(19) United States
(12) Patent Application Publication
(10) Pub. No.: US 2014/0351998 A1
(43) Pub. Date: Nov. 27, 2014

(54) ENGINEERING PLANTS FOR EFFICIENT UPTAKE AND UTILIZATION OF UREA TO IMPROVE CROP PRODUCTION

(71) Applicant: PIONEER HI BRED INTERNATIONAL INC, Johnston, IA (US)

(72) Inventors: RAJEEV GUPTA, Johnston, IA (US); Zhenglin Hou, Ankeny, IA (US); Dale F. Loussaert, Clive, IA (US); Bo Shen, Johnston, IA (US); Lawrence Kent Wood, Johnston, IA (US)

(73) Assignee: PIONEER HI BRED INTERNATIONAL INC, Johnston, IA (US)

(21) Appl. No.: 14/083,491

(22) Filed: Nov. 19, 2013

Related U.S. Application Data
(60) Provisional application No. 61/728,365, filed on Nov. 20, 2012.
(60) Provisional application No. 61/775,753, filed on Mar. 11, 2013.

(51) Int. Cl. C12N 15/82; C12N 9/80; C05C 9/00; C07K 14/415; C07K 14/395; A01G 1/00; C07K 14/40; C07K 14/39; C07K 14/405; C07K 14/335; C07K 14/195; C07K 14/35; C07K 14/38; C07K 14/32

(52) U.S. Cl. CPC C12N 15/8261; C07K 14/38; C12N 9/80; C05C 9/00; C07K 14/415; C07K 14/395; C07K 14/32; C07K 14/40; C07K 14/39; C07K 14/405; C07K 14/335; C07K 14/195; C07K 14/35; A01G 1/001
USPC 800/278; 536/23.1; 536/23.2; 71/28; 435/320.1; 800/298; 800/320.1; 800/312; 800/322; 800/306; 800/320.3; 800/314; 800/320.2; 800/320; 435/468; 435/252.33; 435/254.2; 435/348; 435/325; 435/419; 435/412; 435/415; 435/416; 435/411; 536/23.6; 536/23.74; 536/23.7; 47/58.1 R

(57) ABSTRACT

The present invention provides polynucleotides and related polypeptides related to urea uptake. The invention provides genomic sequences for urea transporter, urease and glutamine synthetase genes. Urea transporters, urease and glutamine synthetase are responsible for controlling nitrogen utilization efficiency in plants. Urea transporter, urease or glutamine synthetase sequences are provided for improving grain yield and plant growth. The invention further provides recombinant expression cassettes, host cells and transgenic plants.

### CROSS-REFERENCE TO RELATED APPLICATIONS

[0001] This application is a utility application which claims the benefit of U.S. Provisional Patent Application No. 61/728,365, filed Nov. 20, 2012 and U.S. Provisional Patent Application No. 61/775,753 filed Mar. 11, 2013, both of which are hereby incorporated herein in their entirety by reference.

### FIELD

[0002] The invention relates generally to the field of molecular biology.

### BACKGROUND

[0003] Global demand for nitrogen (N) fertilizer for use in agricultural production currently stands at approximately two hundred million tons, and this figure is expected to triple by 2050 (“Current World Fertilizer Trends and Outlook 2011/12” Food and Agriculture Organization of the United Nations, 2008; Good, et al., 2004 Trends in Plant Science 9:597-605). N fertilizer has typically been applied at economic optimum levels, and this practice has led to a decrease in the percentage of N that is actually absorbed by the crop (Firbank, (2005) Annals of Applied Biology 146:163-175). It is estimated that approximately 60% of the N fertilizer applied to soil is lost through various processes including leaching and surface run-off, denitrification, volatilization, and microbial consumption (Raun and Johnson, (1999) Agronomy Journal 91(3):357-363). Given that the cost of N fertilizer accounts for approximately 20-30% of the total farm operating cost for corn production in the US, the loss of N from the soil represents a significant economic loss. Furthermore the lost N often ends up in rivers and waterways, and this contamination has led to significant environmental impacts including the poisoning of drinking water as well as a dramatic increase in the size of anoxic dead zones in previously rich fishing grounds. Therefore, even a small increase in the efficiency of plant of uptake of N from the soil would lead to significant cost savings to farmers as well as a decrease in the negative environmental effects associated with modern agricultural production methods.

[0004] Urea is now the dominant form of N fertilizer applied to agricultural soil. Urea accounts for over forty percent of the total N fertilizer used in the US and significantly more in other parts of the world (Kojima, et al., 2006 J Membr Biol 212:83-91). The extensive use of urea is due to a number of factors including its high N percentage (46.7%), relatively low cost, and ease of storage, transport, and application. However, plants are inefficient at the uptake and use of urea directly as an N source. The majority of urea N applied to the soil is decomposed into ammonium (NH₃) and then converted into nitrate (NO₃) during a soil N cycle defined as nitrification. This process is dependent on the presence of microbes and enzymes in the soil, and often the result is not only the conversion of N into forms that are usable by the plant but also the production of other N intermediates which are lost through volatilization and leaching. For many plants NO₃ is the preferred substrate taken into the roots from the soil, and once inside the cell the NO₃ is reduced to nitrite (NO₂) and then converted once again into NH₃. This NH₃ is finally assimilated into amino acids which can be used by the plant cell, and this entire process of reduction and assimilation is energetically expensive for the developing plant.

[0005] While NO₃ is the preferred N source for many plants, it has recently been demonstrated in Arabidopsis and rice that plants possess a specific system for the direct uptake of urea from the environment. In Arabidopsis this system is composed of the Dur3 high affinity transporter (HAT) as well as low affinity transporters (LATs) such as MIPs, NIPs and TIPs. Furthermore, it has long been known that plant cells produce urea endogenously from a number of intracellular processes including the mitochondrial ornithine cycle which metabolizes arginine into urea and ornithine as well as the catabolism of purins or ureides (refs). Urea inside the cell is broken down into NH₃ and CO₂ by a specific enzyme, urease. The NH₃ released is then assimilated into amino acids, primarily through the action of the glutamine synthetase protein (GS).

[0006] The existence of plant transport proteins specialized for the uptake of urea is a relatively recent discovery, and it was long believed that urea, a relatively small polar molecule, entered the cell primarily via passive diffusion through the plasma membrane (Lui, et al., 2003 Plant Cell 15:790-800; Galluci, et al., (1971) Arch Int Physiol Biochim 79(5):881-7). However, the discovery in plants of a highly specific active transport system for urea as well as a number of low affinity transporters capable of facilitating passage of urea and other similar molecules has led to renewed interest in the mechanisms of urea homeostasis. These HATs and LATs are thought to be conserved among both dicots and monocots and the ability to transport urea has been shown for both Arabidopsis and Oryza Dur3 homologues. However, relatively little is known about the function and regulation of high affinity urea transporters in other plant species. Most plant genomes encode one presumptive HAT gene which is homologous to the yeast Dur3 gene, the first characterized member of this group of transporters. These genes encode proteins which belong to the sodium-solute symporter family (SSSF), integral membrane proteins which are generally predicted to contain between eleven and fifteen trans-membrane domains (TMD). While many members of the SSSF use the energy of an inwardly directed electrochemical sodium gradient for co-transport of various substrates, it is believed that Dur3 proteins co-transport urea along a proton gradient. These transporters demonstrate saturable kinetics and Kₘ values in the low micromolar range have been calculated using Xenopus expression systems.

[0007] In addition to the Dur3 HAT, plants genomes also encode a number of potential low affinity urea transporters. These transporters belong to one of several subfamilies of aquaporins, the tonoplastic intrinsic proteins (TIPs), Nod26-like intrinsic proteins (NIPs) and plasma membrane intrinsic proteins (PIPs). Aquaporins have previously been shown to mediate urea transport in addition to water and other substrates in mammals and research is currently ongoing to determine the exact localization and substrate preferences for this diverse set of proteins in plants. However, examination of a representative family member, the Arabidopsis Tip2-1 gene, shows that encoded protein enhances uptake of urea in substrate concentrations ranging from 100 μM to 30 mM in a pH-independent manner. These relatively low affinity transport kinetics are typically seen in channel type proteins, and this is the predicted mode of urea transport given the structural knowledge of the aquaporin proteins.

[0008] The biological necessity of urea transport across cellular membranes is not limited to plants, and various classes of urea transporters have been identified in organisms ranging from bacteria to humans. Perhaps the best studied of these transporters is the Urel-type urea channel of Helicobacter pylori. This integral membrane protein contains six transmembrane domains, and is proton gated. It is believed that Helicobacter transports urea into the cell through Urel and then uses the urease enzyme to break this down into ammonia and carbonic acid. Urea is transported down its concentration gradient as the intracellular urea concentration of urea is relatively low due to high urease activity inside the cell. The breakdown products of urea hydrolysis, ammonia and carbonic acid, are believed to act respectively as extracellular and cytosolic buffers which allow the pathogen to survive in the acidic environment of its host's gastric tract (Sachs, et al., (2006) J Membr Biol 212(2):71-82). However it should be noted that many bacteria use urea hydrolysis as a nitrogen source, and potential Urel genes are encoded in the genomes of bacteria such as Lactobacillus which normally reside in the large intestine of ruminants, a relatively neutral pH environment.

[0009] As previously noted urea inside the cell is degraded by urease, a dedicated enzyme which hydrolyzes urea into ammonia and carbonic acid. The urease enzymes are widely distributed in nature and can be found in bacteria, fungi, algae, plants and invertebrates. Beyond their role in intracellular urea homeostasis, it has also been long known that many ureases exist as extracellular enzymes present in the soil. Urease proteins in the soil are responsible for the degradation of urea into ammonia, a practice that is critical to modern urea-fertilization practices. In bacteria, the urease enzyme is a hetero trimer composed of a large, approximately 60 kDa α-subunit and two smaller, 10-20 kDa β- and γ-subunits. Plants and fungi encode these three distinct components in a single polypeptide transcript. These amidohydrolases contain a metal center in their active site, and this active site is typically filled by two nickel [Ni(II)] ions however it can also be composed of other metal ions including iron. This enzyme has been well studied, and in fact it was the first enzyme crystallized by James B. Sumner in 1926 and was the first protein shown to use Ni(II) ions for function.

[0010] Once urea has been broken down into its component parts by urease, released ammonia is assimilated into amino acids, primarily through the action of glutamine synthetase (GS) enzymes. To date, three types of GS have been identified in prokaryotes and eukaryotes, GSI, GSII and GSM. Investigation of the published plant genomes reveals that only the cytosolic GSI and plastidic GSII genes are encoded and GSI proteins are encoded by several genes whereas only one gene is known to encode GSII. The GSI genes encode proteins that are believed to be localized to the cytosol and contain both a glutamine synthetase catalytic domain (pfam00120) as well as an amidohydro domain of unknown function (pfam04909) (Forde and Lea, (2007) J Exp Bot 58(9):2339-58; Swarbreck, et al., (2011) J Exp Bot 62(4):1511-22). Little is currently known about the role of specific GSI proteins in cellular processes, however examination of knockout lines for various GSI genes has shown that these plants yield significantly less than wild-type controls in both maize and rice and that overexpression of GS1-3 in maize resulted in a marginal increase in grain yield (Martin, et al., (2006) Plant Cell 18(11):3252-74; Tabuchi, et al., (2007) J Exp Bot 58(9):2319-27). The second type of glutamine synthetase enzyme produced by plants, GSII, is localized primarily in the chloroplast and uses ferredoxin, and thus light energy, as an electron donor and reducing source. GSII is primarily responsible for assimilation of ammonia resulting from nitrate reduction and photorespiration which occurs in vegetative tissues. However, GSII is also expressed in the roots, and it is believed to have a role in assimilation of reduced nitrate in these tissues as well (Swarbreck, et al., 2010 J Exp Bot. 62(4): 1511-22).

[0011] The present disclosure includes the identification of a number of putative genes involved in the uptake and assimilation of urea. In particular, approximately two hundred potential urea transporters have been identified and many of these have been tested for the ability to transport urea into the cytosol in cell based assays. As determined from experimental data presented here, “urea-critical” motifs which help to define many of the protein structures required for highly active and specific translocation of urea by Dur3 homologues have also been outlined. While this list of “urea-critical” domains is not exhaustive, future identification of urea transporters using these and other conserved motifs deduced by this method will allow for a greater understanding of the mechanisms of urea movement across cellular membranes. A number of putative urease proteins and glutamine synthetase proteins have also been identified. Approximately 48 potential urease genes have been identified from a variety of sources, principally from sequenced fungal and plant genomes. These genes, which are presumed to function in the breakdown of urea in the cell, are being employed in transgenic stacks in order to create plants that more effectively acquire and utilize urea from the environment, either naturally occurring or applied as a soil or foliar fertilizer supplement.

[0012] Transgenic plants expressing either a single or multiple urea transporters or a urea transporter stacked with urease genes for urea breakdown and glutamine synthethase genes for assimilation of urea-derived N into amino acids have also been created. In this way an agricultural system in which urea derived N might be delivered preferentially to plants and thus avoid loss of N into the environment.

### SUMMARY

[0013] The present invention provides polynucleotides, related polypeptides and all conservatively modified variants of the urea utilization sequences. The invention provides sequences for the DUR genes. Table 1 lists these genes and their sequence ID numbers.

TABLE 1

| | | | POLYNUCLEOTIDE/ |
|---|---|---|---|
| SEQUENCE ID | IDENTITY | ORGANISM | POLYPEPTIDE |
| SEQ ID NO: 1 | Dur3 | Saccharomyces cerevisiae | Polypeptide |
| SEQ ID NO: 2 | Dur3 | Arabidopsis thaliana | Polypeptide |
| SEQ ID NO: 3 | Dur3 | Zea mays | Polypeptide |
| SEQ ID NO: 4 | gi\|31433710 | Oryza sativa | Polypeptide |
| SEQ ID NO: 5 | gi\|168053949 | Physcomitrella patens | Polypeptide |
| SEQ ID NO: 6 | gi\|302821778 | Selaginella moellendorffii | Polypeptide |
| SEQ ID NO: 7 | gi\|302781086 | Selaginella moellendorffii | Polypeptide |
| SEQ ID NO: 8 | gi\|168065203 | Physcomitrella patens | Polypeptide |
| SEQ ID NO: 9 | gi\|308812023 | Ostreococcus tauri | Polypeptide |
| SEQ ID NO: 10 | gi\|145342521 | Ostreococcus lucimarinus | Polypeptide |
| SEQ ID NO: 11 | gi\|298704872 | Ectocarpus siliculosus | Polypeptide |
| SEQ ID NO: 12 | gi\|255079156 | Micromonas sp. | Polypeptide |
| SEQ ID NO: 13 | gi\|219119631 | Phaeodactylum tricornutum | Polypeptide |
| SEQ ID NO: 14 | gi\|219119635 | Phaeodactylum tricornutum | Polypeptide |
| SEQ ID NO: 15 | gi\|224007933 | Thalassiosira pseudonana | Polypeptide |
| SEQ ID NO: 16 | gi\|302851501 | Volvox carteri | Polypeptide |
| SEQ ID NO: 17 | gi\|159488630 | Chlamydomonas reinhardtii | Polypeptide |
| SEQ ID NO: 18 | gi\|15948863 | Chlamydomonas reinhardtii | Polypeptide |
| SEQ ID NO: 19 | gi\|302851503 | Volvox_carteri | Polypeptide |
| SEQ ID NO: 20 | gi\|288556287 | Bacillus_pseudofirmus | Polypeptide |
| SEQ ID NO: 21 | gi\|294500270 | Bacillus_megaterium | Polypeptide |
| SEQ ID NO: 22 | gi\|169827030 | Lysinibacillus_sphaericus | Polypeptide |
| SEQ ID NO: 23 | gi\|299535887 | Lysinibacillus_fusiformis | Polypeptide |
| SEQ ID NO: 24 | gi\|126649708 | Bacillus sp. | Polypeptide |
| SEQ ID NO: 25 | gi\|194015869 | Bacillus_pumilus | Polypeptide |
| SEQ ID NO: 26 | gi\|229166178 | Bacillus_cereus | Polypeptide |
| SEQ ID NO: 27 | gi\|229084325 | Bacillus_cereus | Polypeptide |
| SEQ ID NO: 28 | gi\|157691433 | Bacillus_pumilus | Polypeptide |
| SEQ ID NO: 29 | gi\|229160294 | Bacillus_cereus | Polypeptide |
| SEQ ID NO: 30 | gi\|229095819 | Bacillus_cereus | Polypeptide |
| SEQ ID NO: 31 | gi\|229084968 | Bacillus_cereus | Polypeptide |
| SEQ ID NO: 32 | gi\|229056972 | Bacillus_cereus | Polypeptide |
| SEQ ID NO: 33 | gi\|229132136 | Bacillus_cereus | Polypeptide |
| SEQ ID NO: 34 | gi\|229016589 | Bacillus_cereus | Polypeptide |
| SEQ ID NO: 35 | gi\|30019384 | Bacillus_cereus | Polypeptide |
| SEQ ID NO: 36 | gi\|295703213 | Bacillus_megaterium | Polypeptide |
| SEQ ID NO: 37 | gi\|294497841 | Bacillus_megaterium | Polypeptide |
| SEQ ID NO: 38 | gi\|163939135 | Bacillus_weihenstephanensis | Polypeptide |
| SEQ ID NO: 39 | gi\|229018434 | Bacillus_cereus | Polypeptide |
| SEQ ID NO: 40 | gi\|228951715 | Bacillus_thuringiensis | Polypeptide |
| SEQ ID NO: 41 | gi\|229010629 | Bacillus_mycoides | Polypeptide |
| SEQ ID NO: 42 | gi\|56420674 | Geobacillus_kaustophilus | Polypeptide |
| SEQ ID NO: 43 | gi\|229189425 | Bacillus_cereus | Polypeptide |
| SEQ ID NO: 44 | gi\|311029285 | Bacillus sp. | Polypeptide |
| SEQ ID NO: 45 | gi\|229154903 | Bacillus_cereus | Polypeptide |
| SEQ ID NO: 46 | gi\|254430694 | Cyanobium sp. | Polypeptide |
| SEQ ID NO: 47 | gi\|254430882 | Cyanobium sp. | Polypeptide |
| SEQ ID NO: 48 | gi\|6321771 | Saccharomyces_cerevisiae | Polypeptide |
| SEQ ID NO: 49 | gi\|50291859 | Candida_glabrata | Polypeptide |
| SEQ ID NO: 50 | gi\|255713520 | Lachancea_thermotolerans | Polypeptide |
| SEQ ID NO: 51 | gi\|50306037 | Kluyveromyces_lactis | Polypeptide |
| SEQ ID NO: 52 | gi\|50545892 | Yarrowia_lipolytica | Polypeptide |
| SEQ ID NO: 53 | gi\|50548823 | Yarrowia_lipolytica | Polypeptide |
| SEQ ID NO: 54 | gi\|320580429 | Pichia_angusta | Polypeptide |
| SEQ ID NO: 55 | gi\|302306588 | Ashbya_gossypii | Polypeptide |
| SEQ ID NO: 56 | gi\|50420461 | Debaryomyces_hansenii | Polypeptide |
| SEQ ID NO: 57 | gi\|260949975 | Clavispora_lusitaniae | Polypeptide |
| SEQ ID NO: 58 | gi\|126274215 | Scheffersomyces_stipitis | Polypeptide |
| SEQ ID NO: 59 | gi\|296414848 | Tuber_melanosporum | Polypeptide |
| SEQ ID NO: 60 | gi\|255730941 | Candida_tropicalis | Polypeptide |
| SEQ ID NO: 61 | gi\|212540098 | Penicillium_marneffei | Polypeptide |
| SEQ ID NO: 62 | gi\|254567651 | Pichia_pastoris | Polypeptide |
| SEQ ID NO: 63 | gi\|189197153 | Pyrenophora_tritici-repentis | Polypeptide |
| SEQ ID NO: 64 | gi\|242802844 | Talaromyces_stipitatus | Polypeptide |
| SEQ ID NO: 65 | gi\|145229001 | Aspergillus_niger | Polypeptide |
| SEQ ID NO: 66 | gi\|255730943 | Candida_tropicalis | Polypeptide |
| SEQ ID NO: 67 | gi\|68484979 | Candida_albicans | Polypeptide |
| SEQ ID NO: 68 | gi\|255941014 | Penicillium_chrysogenum | Polypeptide |
| SEQ ID NO: 69 | gi\|121702817 | Aspergillus_clavatus | Polypeptide |
| SEQ ID NO: 70 | gi\|119496809 | Neosartorya_fischeri | Polypeptide |
| SEQ ID NO: 71 | gi\|67516273 | Aspergillus_nidulans | Polypeptide |
| SEQ ID NO: 72 | gi\|149244852 | Lodderomyces_elongisporus | Polypeptide |
| SEQ ID NO: 73 | gi\|115388603 | Aspergillus_terreus | Polypeptide |
| SEQ ID NO: 74 | gi\|154296456 | Botryotinia_fuckeliana | Polypeptide |
| SEQ ID NO: 75 | gi\|46114538 | Gibberella_zeae | Polypeptide |
| SEQ ID NO: 76 | gi\|302883001 | Nectria_haematococca | Polypeptide |
| SEQ ID NO: 77 | gi\|320589404 | Grosmannia_clavigera | Polypeptide |
| SEQ ID NO: 78 | gi\|85090209 | Neurospora_crassa | Polypeptide |
| SEQ ID NO: 79 | gi\|170940378 | Podospora_anserina | Polypeptide |
| SEQ ID NO: 80 | gi\|310797726 | Glomerella_graminicola | Polypeptide |
| SEQ ID NO: 81 | gi\|19112663 | Schizosaccharomyces_pombe | Polypeptide |
| SEQ ID NO: 82 | gi\|312222180 | Leptosphaeria_maculans | Polypeptide |
| SEQ ID NO: 83 | gi\|289614545 | Sordaria_macrospora | Polypeptide |
| SEQ ID NO: 84 | gi\|169599615 | Phaeosphaeria_nodorum | Polypeptide |
| SEQ ID NO: 85 | gi\|39956134 | Magnaporthe_oryzae | Polypeptide |
| SEQ ID NO: 86 | gi\|213405133 | Schizosaccharomyces_japonicus | Polypeptide |
| SEQ ID NO: 87 | gi\|189192454 | Pyrenophora_tritici-repentis | Polypeptide |
| SEQ ID NO: 88 | gi\|302918614 | Nectria_haematococca | Polypeptide |
| SEQ ID NO: 89 | gi\|322712212 | Metarhizium_anisopliae | Polypeptide |
| SEQ ID NO: 90 | gi\|322697316 | Metarhizium_acridum | Polypeptide |
| SEQ ID NO: 91 | gi\|330934127 | Pyrenophora_teres | Polypeptide |
| SEQ ID NO: 92 | gi\|169604778 | Phaeosphaeria_nodorum | Polypeptide |
| SEQ ID NO: 93 | gi\|330912407 | Pyrenophora_teres | Polypeptide |
| SEQ ID NO: 94 | gi\|259483267 | Aspergillus_nidulans | Polypeptide |
| SEQ ID NO: 95 | gi\|320582983 | Pichia_angusta | Polypeptide |
| SEQ ID NO: 96 | gi\|212539780 | Penicillium_marneffei | Polypeptide |
| SEQ ID NO: 97 | gi\|134111404 | Cryptococcus_neoformans | Polypeptide |
| SEQ ID NO: 98 | gi\|238499135 | Aspergillus_flavu | Polypeptide |
| SEQ ID NO: 99 | gi\|169856863 | Coprinopsis_cinerea | Polypeptide |
| SEQ ID NO: 100 | gi\|255933690 | Penicillium_chrysogenum | Polypeptide |
| SEQ ID NO: 101 | gi\|302887803 | Nectria_haematococca | Polypeptide |
| SEQ ID NO: 102 | gi\|212547032 | Penicillium_marneffei | Polypeptide |
| SEQ ID NO: 103 | gi\|259488035 | Aspergillus_nidulans | Polypeptide |
| SEQ ID NO: 104 | gi\|255946776 | Penicillium_chrysogenum | Polypeptide |
| SEQ ID NO: 105 | gi\|238485376 | Aspergillus_flavus | Polypeptide |
| SEQ ID NO: 106 | gi\|322703973 | Metarhizium_anisopliae | Polypeptide |
| SEQ ID NO: 107 | gi\|67901140 | Aspergillus_nidulans | Polypeptide |
| SEQ ID NO: 108 | gi\|317037515 | Aspergillus_niger | Polypeptide |
| SEQ ID NO: 109 | gi\|302682804 | Schizophyllum_commune | Polypeptide |
| SEQ ID NO: 110 | gi\|71024341 | Ustilago_maydis | Polypeptide |
| SEQ ID NO: 111 | gi\|317033878 | Aspergillus_niger | Polypeptide |
| SEQ ID NO: 112 | gi\|145614668 | Magnaporthe_oryzae | Polypeptide |
| SEQ ID NO: 113 | gi\|115401158 | Aspergillus_terreus | Polypeptide |
| SEQ ID NO: 114 | gi\|156054736 | Sclerotinia_sclerotiorum | Polypeptide |
| SEQ ID NO: 115 | gi\|50312585 | Kluyveromyces_lactis | Polypeptide |
| SEQ ID NO: 116 | gi\|302896644 | Nectria_haematococca | Polypeptide |
| SEQ ID NO: 117 | gi\|119494215 | Neosartorya_fischeri | Polypeptide |
| SEQ ID NO: 118 | gi\|121703898 | Aspergillus_clavatus | Polypeptide |
| SEQ ID NO: 119 | gi\|119467414 | Neosartorya_fischeri | Polypeptide |
| SEQ ID NO: 120 | gi\|328353488 | Pichia_pastoris | Polypeptide |
| SEQ ID NO: 121 | gi\|116194181 | Chaetomium_globosu | Polypeptide |
| SEQ ID NO: 122 | gi\|71020987 | Ustilago_maydis | Polypeptide |
| SEQ ID NO: 123 | gi\|126276093 | Scheffersomyces_stipitis | Polypeptide |
| SEQ ID NO: 124 | gi\|50554215 | Yarrowia_lipolytica | Polypeptide |
| SEQ ID NO: 125 | gi\|68467347 | Candida_albicans | Polypeptide |
| SEQ ID NO: 126 | gi\|170116443 | Laccaria_bicolo | Polypeptide |
| SEQ ID NO: 127 | gi\|150866227 | Scheffersomyces_stipitis | Polypeptide |
| SEQ ID NO: 128 | gi\|238878230 | Candida_albicans | Polypeptide |
| SEQ ID NO: 129 | gi\|254573522 | Pichia_pastoris | Polypeptide |
| SEQ ID NO: 130 | gi\|150864823 | Scheffersomyces_stipitis | Polypeptide |
| SEQ ID NO: 131 | gi\|320589645 | Grosmannia_clavigera | Polypeptide |
| SEQ ID NO: 132 | gi\|121703890 | Aspergillus_clavatus | Polypeptide |
| SEQ ID NO: 133 | gi\|254582434 | Zygosaccharomyce_rouxii | Polypeptide |
| SEQ ID NO: 134 | gi\|115385168 | Aspergillus_terreus | Polypeptide |
| SEQ ID NO: 135 | gi\|50306163 | Kluyveromyces_lactis | Polypeptide |
| SEQ ID NO: 136 | gi\|241953289 | Candida_dubliniensis | Polypeptide |
| SEQ ID NO: 137 | gi\|50554657 | Yarrowia_lipolytica | Polypeptide |
| SEQ ID NO: 138 | gi\|241950425 | Candida_dubliniensis | Polypeptide |
| SEQ ID NO: 139 | gi\|294658033 | Debaryomyces_hansenii | Polypeptide |
| SEQ ID NO: 140 | gi\|255728881 | Candida_tropicalis | Polypeptide |
| SEQ ID NO: 141 | gi\|154302535 | Botryotinia_fuckeliana | Polypeptide |
| SEQ ID NO: 142 | gi\|145247042 | Aspergillus_niger | Polypeptide |
| SEQ ID NO: 143 | gi\|149248528 | Lodderomyces_elongisporus | Polypeptide |
| SEQ ID NO: 144 | gi\|254570247 | Pichia_pastoris | Polypeptide |
| SEQ ID NO: 145 | gi\|83767842 | Aspergillus_oryzae | Polypeptide |
| SEQ ID NO: 146 | gi\|312211148 | Leptosphaeria_maculans | Polypeptide |
| SEQ ID NO: 147 | gi\|310798012 | Glomerella_graminicola | Polypeptide |
| SEQ ID NO: 148 | gi\|70996736 | Aspergillus_fumigatus | Polypeptide |
| SEQ ID NO: 149 | gi\|6752428 | Aspergillus_nidulans | Polypeptide |
| SEQ ID NO: 150 | gi\|242773930 | Talaromyces_stipitatus | Polypeptide |
| SEQ ID NO: 151 | gi\|85711289 | Idiomarina_baltica | Polypeptide |
| SEQ ID NO: 152 | gi\|85712112 | Idiomarina_baltica | Polypeptide |
| SEQ ID NO: 153 | gi\|85713181 | Idiomarina_baltica | Polypeptide |
| SEQ ID NO: 154 | gi\|56460634 | Idiomarina_loihiensis | Polypeptide |
| SEQ ID NO: 155 | gi\|56460286 | Idiomarina_loihiensis | Polypeptide |
| SEQ ID NO: 156 | gi\|56459847 | Idiomarina_loihiensis | Polypeptide |
| SEQ ID NO: 157 | gi\|145220852 | Mycobacterium_gilvum | Polypeptide |
| SEQ ID NO: 158 | gi\|126436855 | Mycobacterium sp. | Polypeptide |
| SEQ ID NO: 159 | gi\|108801019 | Mycobacterium sp. | Polypeptide |
| SEQ ID NO: 160 | gi\|118468997 | Mycobacterium_smegmatis | Polypeptide |
| SEQ ID NO: 161 | gi\|118468841 | Mycobacterium_smegmatis | Polypeptide |
| SEQ ID NO: 162 | gi\|120401830 | Mycobacterium_vanbaalenii | Polypeptide |
| SEQ ID NO: 163 | gi\|145220699 | Mycobacterium_gilvum | Polypeptide |
| SEQ ID NO: 164 | gi\|315442349 | Mycobacterium | Polypeptide |
| SEQ ID NO: 165 | gi\|334140505 | Novosphingobium | Polypeptide |
| SEQ ID NO: 166 | gi\|32477973 | Rhodopirellula_baltica | Polypeptide |
| SEQ ID NO: 167 | gi\|327538200 | Rhodopirellula_baltica | Polypeptide |
| SEQ ID NO: 168 | gi\|32474861 | Rhodopirellula_baltica | Polypeptide |
| SEQ ID NO: 169 | gi\|327538129 | Rhodopirellula_baltica | Polypeptide |
| SEQ ID NO: 170 | gi\|327537996 | Rhodopirellula_baltica | Polypeptide |
| SEQ ID NO: 171 | gi\|32475384 | Rhodopirellula_baltica | Polypeptide |
| SEQ ID NO: 172 | gi\|327537309 | Rhodopirellula_baltica | Polypeptide |
| SEQ ID NO: 173 | gi\|32475554 | Rhodopirellula_baltica | Polypeptide |
| SEQ ID NO: 174 | gi\|32473180 | Rhodopirellula_baltica | Polypeptide |
| SEQ ID NO: 175 | gi\|327541778 | Rhodopirellula_baltica | Polypeptide |
| SEQ ID NO: 176 | gi\|116074213 | Synechococcus | Polypeptide |
| SEQ ID NO: 177 | gi\|78185830 | Synechococcus | Polypeptide |
| SEQ ID NO: 178 | gi\|148242226 | Synechococcus | Polypeptide |
| SEQ ID NO: 179 | gi\|318041913 | Synechococcus | Polypeptide |
| SEQ ID NO: 180 | gi\|33866985 | Synechococcus | Polypeptide |
| SEQ ID NO: 181 | gi\|88809430 | Synechococcus | Polypeptide |
| SEQ ID NO: 182 | gi\|260434524 | Synechococcus | Polypeptide |
| SEQ ID NO: 183 | gi\|78214136 | Synechococcus | Polypeptide |
| SEQ ID NO: 184 | gi\|90655563 | Synechococcus | Polypeptide |
| SEQ ID NO: 185 | gi\|90655390 | Synechococcus | Polypeptide |
| SEQ ID NO: 186 | gi\|87124111 | Synechococcus | Polypeptide |
| SEQ ID NO: 187 | gi\|317969309 | Synechococcus | Polypeptide |
| SEQ ID NO: 188 | gi\|15611137 | Helicobacter_pylori | Polypeptide |
| SEQ ID NO: 189 | gi\|53729263 | Actinobacillus_pleuropneumoniae | Polypeptide |
| SEQ ID NO: 190 | gi\|55820375 | Streptococcus_thermophilus | Polypeptide |
| SEQ ID NO: 191 | gi\|237747731 | Oxalobacter_formigenes | Polypeptide |
| SEQ ID NO: 192 | gi\|335997137 | Lactobacillus_ruminis | Polypeptide |
| SEQ ID NO: 193 | gi\|323703445 | Desulfotomaculum_nigrificans | Polypeptide |
| SEQ ID NO: 194 | ZmTIP4-4 | Zea_mays | Polypeptide |
| SEQ ID NO: 195 | ZmNIP2-4 | Zea_mays | Polypeptide |
| SEQ ID NO: 196 | ZmNIP2-1 | Zea_mays | Polypeptide |
| SEQ ID NO: 197 | AtTIP1-1 | Arabidopsis_thaliana | Polypeptide |
| SEQ ID NO: 198 | AtTIP1-2 | Arabidopsis_thaliana | Polypeptide |
| SEQ ID NO: 199 | AtTIP2-1 | Arabidopsis_thaliana | Polypeptide |
| SEQ ID NO: 200 | AtTIP4-1 | Arabidopsis_thaliana | Polypeptide |
| SEQ ID NO: 201 | NtTIPa | Nicotiana_tabacum | Polypeptide |
| SEQ ID NO: 202 | BdTIP4-4 | Brachypodium_distachyon | Polypeptide |
| SEQ ID NO: 203 | BnTIP4-4 | Brassica_napus | Polypeptide |
| SEQ ID NO: 204 | BrTIP4-4 | Brassica_rapa | Polypeptide |
| SEQ ID NO: 205 | GnTIP4-4 | Glycine_max | Polypeptide |
| SEQ ID NO: 206 | LjTIP4-4 | Lotus_japonicus | Polypeptide |
| SEQ ID NO: 207 | OsTIP4-4 | Oryza_sativa | Polypeptide |
| SEQ ID NO: 208 | PpTIP4-4 | Physcomitrella_patens | Polypeptide |
| SEQ ID NO: 209 | PtTIP4-4 | Populus trichocarpa | Polypeptide |
| SEQ ID NO: 210 | SmTIP4-4 | Selaginella_moellendorffii | Polypeptide |
| SEQ ID NO: 211 | SiTIP4-4 | Setaria_italica | Polypeptide |
| SEQ ID NO: 212 | SbTIP4-4 | Sorghum_bicolor | Polypeptide |
| SEQ ID NO: 213 | VvTIP4-4 | Vitis_vinifera | Polypeptide |
| SEQ ID NO: 214 | BdNIP2-4 | Brachypodium_distachyon | Polypeptide |
| SEQ ID NO: 215 | BrNIP2-4 | Brassica_rapa | Polypeptide |
| SEQ ID NO: 216 | GmNIP2-4 | Glycine_max | Polypeptide |
| SEQ ID NO: 217 | LjNIP2-4 | Lotus_japonicus | Polypeptide |
| SEQ ID NO: 218 | MtNIP2-4 | Medicago_truncatula | Polypeptide |
| SEQ ID NO: 219 | OsNIP2-4 | Oryza_sativa | Polypeptide |
| SEQ ID NO: 220 | PpNIP2-4 | Physcomitrella patens | Polypeptide |
| SEQ ID NO: 221 | PtNIP2-4 | Populus_trichocarpa | Polypeptide |
| SEQ ID NO: 222 | SmNIP2-4 | Selaginella_moellendorffii | Polypeptide |
| SEQ ID NO: 223 | SiNIP2-4 | Setaria_italica | Polypeptide |
| SEQ ID NO: 224 | gi\|302781085_ReORF | Selaginella_moellendorffii | Polynucleotide |
| SEQ ID NO: 225 | gi\|308812022_ReORF | Ostreococcus_tauri | Polynucleotide |
| SEQ ID NO: 226 | gi\|255079155_ReORF | Micromonas | Polynucleotide |
| SEQ ID NO: 227 | gi\|219119634_ReORF | Phaeodactylum_tricornutum | Polynucleotide |
| SEQ ID NO: 228 | gi\|159488629_ReORF | Chlamydomonas_reinhardtii | Polynucleotide |
| SEQ ID NO: 229 | gi\|228951658_ReORF | Bacillus_thuringiensis | Polynucleotide |
| SEQ ID NO: 230 | gi\|56418535_ReORF | Geobacillus_kaustophilus | Polynucleotide |
| SEQ ID NO: 231 | gi\|320580020_ReORF | Pichia_angusta | Polynucleotide |
| SEQ ID NO: 232 | gi\|50423530_ReORF | Debaryomyces_hansenii | Polynucleotide |
| SEQ ID NO: 233 | gi\|118467340_ReORF | Mycobacterium_smegmatis | Polynucleotide |
| SEQ ID NO: 234 | gi\|85711242_ReORF | Idiomarina_baltica | Polynucleotide |
| SEQ ID NO: 235 | gi\|224007932_ReORF | Thalassiosira_pseudonana | Polynucleotide |
| SEQ ID NO: 236 | gi\|316994385_ReORF | Bacillus_pseudofirmus | Polynucleotide |
| SEQ ID NO: 237 | gi\|88809298_ReORF | Synechococcus | Polynucleotide |
| SEQ ID NO: 238 | gi\|168053948_ReORF | Physcomitrella_patens | Polynucleotide |
| SEQ ID NO: 239 | gi\|255713519_ReORF | Lachancea_thermotolerans | Polynucleotide |
| SEQ ID NO: 240 | gi\|302306587_ReORF | Ashbya_gossypii | Polynucleotide |
| SEQ ID NO: 241 | gi\|296414847_ReORF | Tuber_melanosporum | Polynucleotide |
| SEQ ID NO: 242 | gi\|255941013_ReORF | Penicillium_chrysogenum | Polynucleotide |
| SEQ ID NO: 243 | gi\|347976380_ReORF | Podospora_anserina | Polynucleotide |
| SEQ ID NO: 244 | gi\|115483685_ReORF | Oryza_sativa | Polynucleotide |
| SEQ ID NO: 245 | gi\|15611137_ReORF | Helicobacter_pylori | Polynucleotide |
| SEQ ID NO: 246 | gi\|53729263_ReORF | Actinobacillus_pleuropneumoniae | Polynucleotide |
| SEQ ID NO: 247 | gi\|55820103_ReORF | Streptococcus_thermophilus | Polynucleotide |
| SEQ ID NO: 248 | gi\|237747731_ReORF | Oxalobacter_formigenes | Polynucleotide |
| SEQ ID NO: 249 | gi\|335997047_ReORF | Lactobacillus_ruminis | Polynucleotide |
| SEQ ID NO: 250 | gi\|323703406_ReORF | Desulfotomaculum_nigrificans | Polynucleotide |
| SEQ ID NO: 251 | gi\|6319685 | Saccharomyces_cerevisiae | Polypeptide |
| SEQ ID NO: 252 | gi\|343768210 | Naumovozyma_dairenensis | Polypeptide |
| SEQ ID NO: 253 | gi\|254584038 | Zygosaccharomyces_rouxii | Polypeptide |
| SEQ ID NO: 254 | gi\|50308629 | Kluyveromyces_lactis | Polypeptide |
| SEQ ID NO: 255 | gi\|255715439 | Lachancea_thermotolerans | Polypeptide |
| SEQ ID NO: 256 | gi\|50294352 | Candida_glabrata | Polypeptide |
| SEQ ID NO: 257 | gi\|254572936 | Komagataella_pastoris | Polypeptide |
| SEQ ID NO: 258 | gi\|150951195 | Scheffersomyces_stipitis4 | Polypeptide |
| SEQ ID NO: 259 | gi\|5731944 | Schizosaccharomyces_pombe | Polypeptide |
| SEQ ID NO: 260 | gi\|310789956 | Glomerella_graminicola | Polypeptide |
| SEQ ID NO: 261 | gi\|85116050 | Neurospora_crassa | Polypeptide |
| SEQ ID NO: 262 | gi\|296818321 | Arthroderma_otae | Polypeptide |
| SEQ ID NO: 263 | gi\|50788080 | Aspergillus_fumigatus | Polypeptide |
| SEQ ID NO: 264 | gi\|340517340 | Trichoderma_reesei | Polypeptide |
| SEQ ID NO: 265 | gi\|212540166 | Penicillium_marneffei | Polypeptide |
| SEQ ID NO: 266 | gi\|258565811 | Uncinocarpus_reesii | Polypeptide |
| SEQ ID NO: 267 | gi\|295673098 | Paracoccidioides_brasiliensis | Polypeptide |
| SEQ ID NO: 268 | gi\|119496869 | Neosartorya_fischeri | Polypeptide |
| SEQ ID NO: 269 | gi\|303322831 | Coccidioides_posadasii | Polypeptide |
| SEQ ID NO: 270 | gi\|302652330\| | Trichophyton_verrucosum | Polypeptide |
| SEQ ID NO: 271 | gi\|302927660 | Nectria_haematococca | Polypeptide |
| SEQ ID NO: 272 | gi\|317025294 | Aspergillus_niger | Polypeptide |
| SEQ ID NO: 273 | gi\|171687653 | Podospora_anserina | Polypeptide |
| SEQ ID NO: 274 | gi\|326474616 | Trichophyton_tonsurans | Polypeptide |
| SEQ ID NO: 275 | gi\|336267190 | Sordaria_macrospora | Polypeptide |
| SEQ ID NO: 276 | gi\|46107714 | Gibberella_zeae | Polypeptide |
| SEQ ID NO: 277 | gi\|330935671 | Pyrenophora_teres | Polypeptide |
| SEQ ID NO: 278 | gi\|347827989 | Botryotinia_fuckeliana | Polypeptide |
| SEQ ID NO: 279 | gi\|169771067 | Aspergillus_oryzae | Polypeptide |
| SEQ ID NO: 280 | gi\|67516299 | Aspergillus_nidulans | Polypeptide |
| SEQ ID NO: 281 | gi\|238486420 | Aspergillus_flavus | Polypeptide |
| SEQ ID NO: 282 | gi\|108859293 | Agaricus_bisporus | Polypeptide |
| SEQ ID NO: 283 | gi\|301344555 | Oryza_sativa | Polypeptide |
| SEQ ID NO: 284 | gi\|170098735 | Laccaria_bicolor | Polypeptide |
| SEQ ID NO: 285 | gi\|242042716 | Sorghum_bicolor | Polypeptide |
| SEQ ID NO: 286 | gi\|302774665 | Selaginella_moellendorffii | Polypeptide |
| SEQ ID NO: 287 | gi\|353227226 | Piriformospora_indica | Polypeptide |
| SEQ ID NO: 288 | gi\|168056442 | Physcomitrella_patens | Polypeptide |
| SEQ ID NO: 289 | gi\|71023925 | Ustilago_maydis | Polypeptide |
| SEQ ID NO: 290 | gi\|351722260 | Glycine_max | Polypeptide |
| SEQ ID NO: 291 | gb\|M65260.1 | Canavalia_ensiformis | Polypeptide |
| SEQ ID NO: 292 | gi\|225425839 | Vitis_vinifera | Polypeptide |
| SEQ ID NO: 293 | gi\|222143559 | Morus_alba | Polypeptide |
| SEQ ID NO: 294 | gi\|14599436 | Solanum_tuberosum | Polypeptide |
| SEQ ID NO: 295 | gi\|14599434 | Solanum_tuberosum | Polypeptide |
| SEQ ID NO: 296 | gi\|145337258 | Arabidopsis_thaliana | Polypeptide |
| SEQ ID NO: 297 | gi\|297838494 | Arabidopsis_lyrata | Polypeptide |
| SEQ ID NO: 298 | gi\|357123667 | Brachypodium_distachyon | Polypeptide |
| SEQ ID NO: 299 | AtGS1-3 | Arabidopsis_thaliana | Polypeptide |
| SEQ ID NO: 300 | AtGS1-3CDS | Arabidopsis_thaliana | Polynucleotide |
| SEQ ID NO: 301 | ZmGS1-3PRT | Zea_mays | Polypeptide |
| SEQ ID NO: 302 | ZmGS1-3CDS | Zea_mays | Polynucleotide |
| SEQ ID NO: 303 | AtDUR3_Promoter | Arabidopsis thaliana | Polynucleotide |
| SEQ ID NO: 304 | 35S_Promoter | artificial sequence | Polynucleotide |
| SEQ ID NO: 305 | ZmPEPC_Promoter | Zea mays | Polynucleotide |
| SEQ ID NO: 306 | ZmRM2_Promoter | Zea mays | Polynucleotide |
| SEQ ID NO: 307 | AtTUB_Promoter | Arabidopsis thaliana | Polynucleotide |
| SEQ ID NO: 308 | ZmUBI_Promoter | Zea mays | Polynucleotide |
| SEQ ID NO: 309 | RCC3_Promoter | artificial sequence | Polynucleotide |
| SEQ ID NO: 310 | Block_1 | artificial sequence | Polypeptide |
| SEQ ID NO: 311 | Block_2 | artificial sequence | Polypeptide |
| SEQ ID NO: 312 | Block_3 | artificial sequence | Polypeptide |
| SEQ ID NO: 313 | Block_4 | artificial sequence | Polypeptide |
| SEQ ID NO: 314 | Block_5 | artificial sequence | Polypeptide |
| SEQ ID NO: 315 | Urea_critical_motif_1 | artificial sequence | Polypeptide |
| SEQ ID NO: 316 | Urea_critical_motif_2 | artificial sequence | Polypeptide |
| SEQ ID NO: 317 | Urea_critical_motif_3 | artificial sequence | Polypeptide |
| SEQ ID NO: 318 | Urea_critical_motif_4 | artificial sequence | Polypeptide |
| SEQ ID NO: 319 | Urea_critical_motif_5 | artificial sequence | Polypeptide |
| SEQ ID NO: 320 | Urea_critical_motif_6 | artificial sequence | Polypeptide |
| SEQ ID NO: 321 | ZmUreaseCDS | Zea mays | Polynucleotide |
| SEQ ID NO: 322 | ZmUreasePRT | Zea mays | Polypeptide |

[0014] Therefore, in one aspect, the present invention relates to an isolated nucleic acid comprising an isolated polynucleotide sequence encoding a urea transporter, a urease or a glutamine synthetase polypeptide. One embodiment of the invention is an isolated polynucleotide comprising a nucleotide sequence selected from the group consisting of: (a) the nucleotide sequence comprising SEQ ID NOS: 224-250, 300, 302 and 321; (b) the nucleotide sequence encoding an amino acid sequence comprising SEQ ID NOS: 1-223, 251-299, 301 and 322 and (c) the nucleotide sequence comprising at least 70% sequence identity to SEQ ID NOS: 224-250, 300, 302 and 321, wherein said polynucleotide encodes a polypeptide having urea transport, urea breakdown, or ammonia assimilation activity.

[0015] Compositions of the invention include an isolated polypeptide comprising an amino acid sequence selected from the group consisting of: (a) the amino acid sequence comprising SEQ ID NOS: 1-223, 251-299, 301 and 322 and (b) the amino acid sequence comprising at least 70% sequence identity to SEQ ID NOS: 1-223, 251-299, 301 and 322, wherein said polypeptide has urea transport, urea breakdown or ammonia assimilation activity.

[0016] In another aspect, the present invention relates to a recombinant expression cassette comprising a nucleic acid as described. Additionally, the present invention relates to a vector containing the recombinant expression cassette. Further, the vector containing the recombinant expression cassette can facilitate the transcription and translation of the nucleic acid in a host cell. The present invention also relates to the host cells able to express the polynucleotide of the present invention. A number of host cells could be used, such as but not limited to, microbial, mammalian, plant or insect.

[0017] In yet another embodiment, the present invention is directed to a transgenic plant or plant cells, containing the nucleic acids of the present invention. Preferred plants containing the polynucleotides of the present invention include but are not limited to maize, soybean, sunflower, sorghum, canola, wheat, alfalfa, cotton, rice, barley, tomato, switchgrass, myscanthus, triticale and millet. In another embodiment, the transgenic plant is a maize plant or plant cells. Another embodiment is the transgenic seeds from the transgenic plant. Another embodiment of the invention includes plants comprising a urea transporter, a urease, or a glutamine synthetase polypeptide of the invention operably linked to a promoter that drives expression in the plant. The plants of the invention can have altered nitrogen use efficiency as compared to a control plant. In some plants, the nitrogen use is altered in a vegetative tissue, a reproductive tissue, or a vegetative tissue and a reproductive tissue. Plants of the invention can have at least one of the following phenotypes including but not limited to: increased leaf size, increased ear size, increased seed size, increased endosperm size, alterations in the relative size of embryos and endosperms leading to changes in the relative levels of protein, oil and/or starch in the seeds, absence of tassels, absence of functional pollen bearing tassels or increased plant size.

[0018] Another embodiment of the invention would be plants that have been genetically modified at a genomic locus, wherein the genomic locus encodes a urea transporter, a urease or a glutamine synthetase polypeptide of the invention.

[0019] Methods for increasing the activity of a urea transporter, a urease or a glutamine synthetase polypeptide in a plant are provided. The method can comprise introducing into the plant a urea transporter, a urease or a glutamine synthetase polynucleotide of the invention. Providing the polypeptide can decrease the number of cells in plant tissue, modulating the tissue growth and size.

[0020] Compositions further include plants and seed having a DNA construct comprising a nucleotide sequence of interest operably linked to a promoter of the current invention. In specific embodiments, the DNA construct is stably integrated into the genome of the plant. The method comprises introducing into a plant a nucleotide sequence of interest operably linked to a promoter of the invention.

### BRIEF DESCRIPTION OF THE FIGURES

[0021] FIG. 1: The majority of urea N applied to the soil is decomposed into ammonium (NH₃) and then converted into nitrate (NO₃) during a soil N cycle defined as nitrification. This process is dependent on the presence of microbes and enzymes in the soil, and often the result is not only the conversion of N into forms that are usable by the plant but also the production of other N intermediates which are lost through volatilization and leaching. For many plants NO₃ is the preferred substrate taken into the roots from the soil, and once inside the cell the NO₃ is reduced to nitrite (NO₂) and then converted once again into NH₃. This NH₃ is finally assimilated into amino acids which can be used by the plant cell, and this entire process of reduction and assimilation is energetically expensive for the developing plant. Creation of a transgenic plant capable of efficiently taking up urea directly from the soil will prevent loss of N during microbial conversion processes as well as bypass the necessity to reduce nitrate to ammonia inside the plant cell.

[0022] FIG. 2: Urea from the extracellular environment is taken into the cell through specific high-affinity urea transporters such as Dur3, or through less specific low affinity channels such as the aquaporin related NIP proteins. It is speculated that a related group of vacuolar localized proteins, TIPs, function to mobilize urea from intracellular stores. Urea is also produced by endogenous processes such as protein and nucleic acid degradation. Inside the cell urea is degraded by urease, a dedicated enzyme which hydrolyzes urea into ammonia and carbonic acid. Once urea has been broken down into its component parts by urease, released ammonia is assimilated into amino acids, primarily through the action of glutamine synthetase (GS) enzymes but possibly through the action of additional NH₃ metabolizing enzymes.

[0023] FIG. 3: Sequences of potential DUR3 homologues were obtained from a variety of sources, principally focused on microbes, fungi and lower photosynthetic plants and phylogenetic analysis was performed to examine the relationship among transporters. Proteins which have been confirmed as capable of transporting urea in previous research are shown in green. Transporters from diverse clades which were selected for gene synthesis and subsequent functional characterization are shown in blue.

[0024] FIG. 4: B73 maize seedlings were hydroponically grown in a complete synthetic nutrient mix containing 5 mM NO₃ as a nitrogen source until approximately the V4 growth stage. Plants were then either switched to a medium containing no nitrogen or allowed to remain in 5 mM NO₃ (labeled NO₃ in graph). After 3 days growth in no nitrogen media, plants were switched to a growth medium containing 5 mM urea for the 1 hour, 3 hours, 6 hours or 24 hours. Plants were collected and tissues harvested at each of the time points as well as before induction with urea (No nitrogen). qPCR analysis of root tissue from these maize seedlings shows the ZmDur3 is induced by switching to growth media containing 5 mM urea as the sole nitrogen source when compared to plants grown in either no nitrogen or grown in constant amounts of nitrate (FIG. 2).

[0025] FIG. 5: A number of genes encoding potential urease proteins have been identified (SEQ ID NOS: 251-298). Forty-eight known or putative ureases were obtained from a variety of sources, primarily of fungal or plant origin. Phylogenetic analysis was performed to examine the relationship among the known and putative urease proteins and these results are presented in the cladogram in FIG. 3.

[0026] FIG. 6: Protein sequences of DUR3 homologues from Arabidopsis thaliana, Aspergillus nidulans, Debaromyces hansenii, Oryza sativa-Japonica, Phaeodactylum tricornutum, Pichia angusta, Saccharomyces cerevisiae, Selaginella moellendorffii and Synechococcus sp.WH7805 were used to create alignments and identify conserved blocks. These blocks were modeled on alignment files created using the ClustalW2 multiple sequence alignment program and amino acid residues that were absolutely conserved among all of the sequences initially used to define the blocks were identified. Using these conserved residues as a template, a second in silico screen to identify the subset of amino which are not conserved in either the Geobacillus kaustophilus or the Mycobacterium smegmatis sequence (both demonstrate little or no ability to transport urea in a complementation assay) was performed. The residues absolutely conserved in verified transporters and not conserved in either of two non-functional urea transporters are shown in red and these were used to create “urea-critical” motifs which are predicted to have a major positive influence on the ability to transport urea in vivo.

[0027] FIG. 7: A 3 dimensional structure topology of the urea transporter core domain and the Rocket-switch mechanism. (a) and (b) A schematic 3D graph of a urea transporter core domain based sodium/galactose transporter from Vibrio parahaemolyticus (vSGLT, PDB:2xq2). The N-terminal half 5 helices are represented by black cylinders while the C-terminal are grey cylinders. In order to delineate the key helical topology clearly, many interhelical elements are omitted. The helix TM1 and its symmetrical counterpart TM6 are unwound at middle. These coiled residues in combination with the middle sections of TM3 and TM8 make up the urea binding site. The model represents an outward-facing conformation. (a) is a view from extracellular side while (b) is viewed along with the pseudo-two-fold rotation axis parallel to the bilayer. (c) A cartoon representation of a rocket-switch or alternative-access mechanism. Although the sequence is intertwined, its 3D structure could be viewed as two subunits A and B. The inter-subunit rotation driven by proton binding enables conformational recycling.

[0028] FIG. 8: Sequence/structure alignment and TM helix prediction, were used to identify the 10 core transmembrane helices and the putative urea binding sequence motifs. The first 5 TM domains which compose one half of the symmetrical core protein are shown in the aligment as grey boxes. The 3D model reveals that the putative binding site is at the center of protein, suggesting protein motifs in the middle of sections of TM1, TM3, TM6 and TM8 are important for urea recognition while TM2, TM4, TM5, TM7, TM9 and TM10 likely play a structural role. The residues mutated to test this model are also shown in the figure as dashed ovals. The I180 residue is located in the middle of TM4 and likely interacts with the plasma membrane. Among verified Dur3-type urea transporters this position is conserved and occupied by hydrophobic residues such as I, L and V. Mutation of I180 to aspartic acid (D) introduces a hydrophilic charged residue which should drastically disrupt the structural integrity of the transporter. W72 is near the unwound area of TM1 and is likely involved in urea binding. Both mutated residues fall in or near previously described conserved Blocks 1 and 2 in the N-terminal half of the urea transporter (represented by solid or dashed rectangles, respectively).

[0029] FIG. 9: Uptake assays of [¹⁴C]-urea into dur3Δ yeast cells expressing one of several urea transporters identified during screening were performed essentially as previously described with slight modifications (Morel, et al., Fungal Genetics and Biology 2008). dur3A yeast cells were grown to mid log phase before harvesting and resuspending in uptake buffer. Cells were then incubated with the 0 μM to 200 μM of [¹⁴C] spiked urea and allowed to incubate in the presences of substrate for four minutes. Cells were then washed and a liquid scintillation counter was used to determine the amount of urea taken into the cells. As seen in FIG. 5, many of the transporters dramatically increased the amount of labeled urea taken into the cell even at extracellular concentrations as low as 10 μM and during relatively short times.

[0030] FIG. 10: Constructs designed for co-expression of two urea transporters from both a constitutive and a root preferred promoter have been designed and created. These constructs are to be transformed into both Arabidopsis and maize Gaspe germplasm using a previously established Agrobacterium mediated transformation protocol. Positive transgene events will be assessed for general growth and reproductive parameters as well as screened for an increased ability to use urea as a nitrogen source. Transgenic plants will be assessed for the potential of enhanced urea uptake at both low and high levels of extracellular urea and significant events would be expected to increase uptake and N status of the cell over a wide range of urea in the growth medium as illustrated in the figure.

[0031] FIG. 11: To illustrate the impact of manipulation of these genes in transgenic corn, field tests have been conducted. Progeny seed of multiple transgenic events for a single transformation vector, PHP45645, were planted in the field to evaluate the transgenes' ability to enhance yield/NUE under normal (NN) and reduced soil (LN) nitrogen as compared to the non-transgenic control plants (BN). This vector contains sequence encoding the native maize DUR3 polypeptide (SEQ ID NO: 3) under the control of the root preferred RM2 promoter as well as the maize GS1-3 (SEQ ID NO: 301) and the urease (SEQ ID NO: 322) polypeptides under the control of the PEPC promoter. These experiments were conducted at multiple locations with multiple replicates, and the data collected measured plant yield. The experimental data, presented as average bushels per acre yield, reveal the transgenic corn plants perform equivalent to non-transgenic control plants under low N conditions, however yield is slightly reduced for transgenic plants compared to non-transgenic controls under normal N field conditions. These results indicate that overexpression of the maize Dur3 protein, earner characterized as a relatively poor urea transporter using yeast uptake assays, might not be sufficient to enhance urea uptake in a field environment. Additional yield trials will also be conducted using similar stack constructs containing the more efficient urea transporters described in this text.

### DETAILED DESCRIPTION

[0032] Unless defined otherwise, all technical and scientific terms used herein have the same meaning as commonly understood by one of ordinary skill in the art to which this invention belongs. Unless mentioned otherwise, the techniques employed or contemplated herein are standard methodologies well known to one of ordinary skill in the art. The materials, methods and examples are illustrative only and not limiting. The following is presented by way of illustration and is not intended to limit the scope of the invention.

[0033] The present inventions now will be described more fully hereinafter with reference to the accompanying drawings, in which some, but not all embodiments of the invention are shown. Indeed, these inventions may be embodied in many different forms and should not be construed as limited to the embodiments set forth herein; rather, these embodiments are provided so that this disclosure will satisfy applicable legal requirements. Like numbers refer to like elements throughout.

[0034] Many modifications and other embodiments of the inventions set forth herein will come to mind to one skilled in the art to which these inventions pertain having the benefit of the teachings presented in the foregoing descriptions and the associated drawings. Therefore, it is to be understood that the inventions are not to be limited to the specific embodiments disclosed and that modifications and other embodiments are intended to be included within the scope of the appended claims. Although specific terms are employed herein, they are used in a generic and descriptive sense only and not for purposes of limitation.

[0035] The practice of the present invention will employ, unless otherwise indicated, conventional techniques of botany, microbiology, tissue culture, molecular biology, chemistry, biochemistry and recombinant DNA technology, which are within the skill of the art. Such techniques are explained fully in the literature. See, e.g., Langenheim and Thimann, BOTANY: PLANT BIOLOGY AND ITS RELATION TO HUMAN AFFAIRS, John Wiley (1982); CELL CULTURE AND SOMATIC CELL GENETICS OF PLANTS, vol. 1, Vasil, ed. (1984); Stanier, et al., THE MICROBIAL WORLD, 5^{th} ed., Prentice-Hall (1986); Dhringra and Sinclair, BASIC PLANT PATHOLOGY METHODS, CRC Press (1985); Maniatis, et al., MOLECULAR CLONING: A LABORATORY MANUAL (1982); DNA CLONING, vols. I and II, Glover, ed. (1985); OLIGONUCLEOTIDE SYNTHESIS, Gait, ed. (1984); NUCLEIC ACID HYBRIDIZATION, Hames and Higgins, eds. (1984) and the series METHODS IN ENZYMOLOGY, Colowick and Kaplan, eds, Academic Press, Inc., San Diego, Calif.

[0036] Units, prefixes and symbols may be denoted in their SI accepted form. Unless otherwise indicated, nucleic acids are written left to right in 5′ to 3′ orientation; amino acid sequences are written left to right in amino to carboxy orientation, respectively. Numeric ranges are inclusive of the numbers defining the range. Amino acids may be referred to herein by either their commonly known three letter symbols or by the one-letter symbols recommended by the IUPAC-IUB Biochemical Nomenclature Commission. Nucleotides, likewise, may be referred to by their commonly accepted single-letter codes. The terms defined below are more fully defined by reference to the specification as a whole.

[0037] In describing the present invention, the following terms will be employed and are intended to be defined as indicated below.

[0038] By “microbe” is meant any microorganism (including both eukaryotic and prokaryotic microorganisms), such as fungi, yeast, bacteria, actinomycetes, algae and protozoa, as well as other unicellular structures.

[0039] By “amplified” is meant the construction of multiple copies of a nucleic acid sequence or multiple copies complementary to the nucleic acid sequence using at least one of the nucleic acid sequences as a template. Amplification systems include the polymerase chain reaction (PCR) system, ligase chain reaction (LCR) system, nucleic acid sequence based amplification (NASBA, Cangene, Mississauga, Ontario), Q-Beta Replicase systems, transcription-based amplification system (TAS), and strand displacement amplification (SDA). See, e.g., DIAGNOSTIC MOLECULAR MICROBIOLOGY: PRINCIPLES AND APPLICATIONS, Persing, et al., eds., American Society for Microbiology, Washington, D.C. (1993). The product of amplification is termed an amplicon.

[0040] The term “conservatively modified variants” applies to both amino acid and nucleic acid sequences. With respect to particular nucleic acid sequences, conservatively modified variants refer to those nucleic acids that encode identical or conservatively modified variants of the amino acid sequences. Because of the degeneracy of the genetic code, a large number of functionally identical nucleic acids encode any given protein. For instance, the codons GCA, GCC, GCG and GCU all encode the amino acid alanine. Thus, at every position where an alanine is specified by a codon, the codon can be altered to any of the corresponding codons described without altering the encoded polypeptide. Such nucleic acid variations are “silent variations” and represent one species of conservatively modified variation. Every nucleic acid sequence herein that encodes a polypeptide also describes every possible silent variation of the nucleic acid. One of ordinary skill will recognize that each codon in a nucleic acid (except AUG, which is ordinarily the only codon for methionine; one exception is Micrococcus rubens, for which GTG is the methionine codon (Ishizuka, et al., (1993) J. Gen. Microbiol. 139:425-32) can be modified to yield a functionally identical molecule. Accordingly, each silent variation of a nucleic acid, which encodes a polypeptide of the present invention, is implicit in each described polypeptide sequence and incorporated herein by reference.

[0041] As to amino acid sequences, one of skill will recognize that individual substitutions, deletions or additions to a nucleic acid, peptide, polypeptide or protein sequence which alters, adds or deletes a single amino acid or a small percentage of amino acids in the encoded sequence is a “conservatively modified variant” when the alteration results in the substitution of an amino acid with a chemically similar amino acid. Thus, any number of amino acid residues selected from the group of integers consisting of from 1 to 15 can be so altered. Thus, for example, 1, 2, 3, 4, 5, 7 or 10 alterations can be made. Conservatively modified variants typically provide similar biological activity as the unmodified polypeptide sequence from which they are derived. For example, substrate specificity, enzyme activity or ligand/receptor binding is generally at least 30%, 40%, 50%, 60%, 70%, 80% or 90%, preferably 60-90% of the native protein for its native substrate. Conservative substitution tables providing functionally similar amino acids are well known in the art.

[0042] The following six groups each contain amino acids that are conservative substitutions for one another:

[0043] 1) Alanine (A), Serine (S), Threonine (T);

[0044] 2) Aspartic acid (D), Glutamic acid (E);

[0045] 3) Asparagine (N), Glutamine (Q);

[0046] 4) Arginine (R), Lysine (K);

[0047] 5) Isoleucine (I), Leucine (L), Methionine (M), Valine (V) and

[0048] 6) Phenylalanine (F), Tyrosine (Y), Tryptophan (W).

See also, Creighton, PROTEINS, W.H. Freeman and Co. (1984).

[0049] As used herein, “consisting essentially of” means the inclusion of additional sequences to an object polynucleotide where the additional sequences do not selectively hybridize, under stringent hybridization conditions, to the same cDNA as the polynucleotide and where the hybridization conditions include a wash step in 0.1×SSC and 0.1% sodium dodecyl sulfate at 65° C.

[0050] By “encoding” or “encoded,” with respect to a specified nucleic acid, is meant comprising the information for translation into the specified protein. A nucleic acid encoding a protein may comprise non-translated sequences (e.g., introns) within translated regions of the nucleic acid, or may lack such intervening non-translated sequences (e.g., as in cDNA). The information by which a protein is encoded is specified by the use of codons. Typically, the amino acid sequence is encoded by the nucleic acid using the “universal” genetic code. However, variants of the universal code, such as is present in some plant, animal and fungal mitochondria, the bacterium Mycoplasma capricolumn (Yamao, et al., (1985) Proc. Natl. Acad. Sci. USA 82:2306-9) or the ciliate Macronucleus, may be used when the nucleic acid is expressed using these organisms.

[0051] When the nucleic acid is prepared or altered synthetically, advantage can be taken of known codon preferences of the intended host where the nucleic acid is to be expressed. For example, although nucleic acid sequences of the present invention may be expressed in both monocotyledonous and dicotyledonous plant species, sequences can be modified to account for the specific codon preferences and GC content preferences of monocotyledonous plants or dicotyledonous plants as these preferences have been shown to differ (Murray, et al., (1989) Nucleic Acids Res. 17:477-98, and herein incorporated by reference). Thus, the maize preferred codon for a particular amino acid might be derived from known gene sequences from maize. Maize codon usage for 28 genes from maize plants is listed in Table 4 of Murray, et al., supra.

[0052] As used herein, “heterologous” in reference to a nucleic acid is a nucleic acid that originates from a foreign species, or, if from the same species, is substantially modified from its native form in composition and/or genomic locus by deliberate human intervention. For example, a promoter operably linked to a heterologous structural gene is from a species different from that from which the structural gene was derived or, if from the same species, one or both are substantially modified from their original form. A heterologous protein may originate from a foreign species or, if from the same species, is substantially modified from its original form by deliberate human intervention.

[0053] By “host cell” is meant a cell, which comprises a heterologous nucleic acid sequence of the invention, which contains a vector and supports the replication and/or expression of the expression vector. Host cells may be prokaryotic cells such as E. coli, or eukaryotic cells such as yeast, insect, plant, amphibian or mammalian cells. Preferably, host cells are monocotyledonous or dicotyledonous plant cells, including but not limited to maize, sorghum, sunflower, soybean, wheat, alfalfa, rice, cotton, canola, barley, millet, switchgrass, myscanthus, triticale and tomato. A particularly preferred monocotyledonous host cell is a maize host cell.

[0054] The term “hybridization complex” includes reference to a duplex nucleic acid structure formed by two single-stranded nucleic acid sequences selectively hybridized with each other.

[0055] The term “introduced” in the context of inserting a nucleic acid into a cell, means “transfection” or “transformation” or “transduction” and includes reference to the incorporation of a nucleic acid into a eukaryotic or prokaryotic cell where the nucleic acid may be incorporated into the genome of the cell (e.g., chromosome, plasmid, plastid or mitochondrial DNA), converted into an autonomous replicon or transiently expressed (e.g., transfected mRNA).

[0056] The terms “isolated” refers to material, such as a nucleic acid or a protein, which is substantially or essentially free from components which normally accompany or interact with it as found in its naturally occurring environment. The isolated material optionally comprises material not found with the material in its natural environment. Nucleic acids, which are “isolated”, as defined herein, are also referred to as “heterologous” nucleic acids. Unless otherwise stated, the term “GS nucleic acid” means a nucleic acid comprising a polynucleotide (“GS polynucleotide”) encoding a full length or partial length Glutamine Synthetase polypeptide.

[0057] As used herein, “nucleic acid” includes reference to a deoxyribonucleotide or ribonucleotide polymer in either single- or double-stranded form, and unless otherwise limited, encompasses known analogues having the essential nature of natural nucleotides in that they hybridize to single-stranded nucleic acids in a manner similar to naturally occurring nucleotides (e.g., peptide nucleic acids).

[0058] By “nucleic acid library” is meant a collection of isolated DNA or RNA molecules, which comprise and substantially represent the entire transcribed fraction of a genome of a specified organism. Construction of exemplary nucleic acid libraries, such as genomic and cDNA libraries, is taught in standard molecular biology references such as Berger and Kimmel, GUIDE TO MOLECULAR CLONING TECHNIQUES, from the series METHODS IN ENZYMOLOGY, vol. 152, Academic Press, Inc., San Diego, Calif. (1987); Sambrook, et al., MOLECULAR CLONING: A LABORATORY MANUAL, 2^{nd} ed., vols. 1-3 (1989) and CURRENT PROTOCOLS IN MOLECULAR BIOLOGY, Ausubel, et al., eds, Current Protocols, a joint venture between Greene Publishing Associates, Inc. and John Wiley & Sons, Inc. (1994 Supplement).

[0059] As used herein “operably linked” includes reference to a functional linkage between a first sequence, such as a promoter and a second sequence, wherein the promoter sequence initiates and mediates transcription of the DNA corresponding to the second sequence.

[0060] Generally, operably linked means that the nucleic acid sequences being linked are contiguous and, where necessary to join two protein coding regions, contiguous and in the same reading frame.

[0061] As used herein, the term “plant” includes reference to whole plants, plant organs (e.g., leaves, stems, roots, etc.), seeds and plant cells and progeny of same. Plant cell, as used herein includes, without limitation, seeds, suspension cultures, embryos, meristematic regions, callus tissue, leaves, roots, shoots, gametophytes, sporophytes, pollen and microspores. The class of plants, which can be used in the methods of the invention, is generally as broad as the class of higher plants amenable to transformation techniques, including both monocotyledonous and dicotyledonous plants including species from the genera: Cucurbita, Rosa, Vitis, Juglans, Fragaria, Lotus, Medicago, Onobrychis, Trifolium, Trigonella, Vigna, Citrus, Linum, Geranium, Manihot, Daucus, Arabidopsis, Brassica, Raphanus, Sinapis, Atropa, Capsicum, Datura, Hyoscyamus, Lycopersicon, Nicotiana, Solanum, Petunia, Digitalis, Majorana, Ciahorium, Helianthus, Lactuca, Bromus, Asparagus, Antirrhinum, Heterocallis, Nemesis, Pelargonium, Panieum, Pennisetum, Ranunculus, Senecio, Salpiglossis, Cucumis, Browaalia, Glycine, Pisum, Phaseolus, Lolium, Oryza, Avena, Hordeum, Secale, Allium and Triticum. A particularly preferred plant is Zea mays.

[0062] As used herein, “yield” may include reference to bushels per acre of a grain crop at harvest, as adjusted for grain moisture (15% typically for maize, for example). Grain moisture is measured in the grain at harvest. The adjusted test weight of grain is determined to be the weight in pounds per bushel, adjusted for grain moisture level at harvest.

[0063] As used herein, “polynucleotide” includes reference to a deoxyribopolynucleotide, ribopolynucleotide or analogs thereof that have the essential nature of a natural ribonucleotide in that they hybridize, under stringent hybridization conditions, to substantially the same nucleotide sequence as naturally occurring nucleotides and/or allow translation into the same amino acid(s) as the naturally occurring nucleotide(s). A polynucleotide can be full-length or a subsequence of a native or heterologous structural or regulatory gene. Unless otherwise indicated, the term includes reference to the specified sequence as well as the complementary sequence thereof. Thus, DNAs or RNAs with backbones modified for stability or for other reasons are “polynucleotides” as that term is intended herein. Moreover, DNAs or RNAs comprising unusual bases, such as inosine, or modified bases, such as tritylated bases, to name just two examples, are polynucleotides as the term is used herein. It will be appreciated that a great variety of modifications have been made to DNA and RNA that serve many useful purposes known to those of skill in the art. The term polynucleotide as it is employed herein embraces such chemically, enzymatically or metabolically modified forms of polynucleotides, as well as the chemical forms of DNA and RNA characteristic of viruses and cells, including inter alia, simple and complex cells.

[0064] The terms “polypeptide,” “peptide” and “protein” are used interchangeably herein to refer to a polymer of amino acid residues. The terms apply to amino acid polymers in which one or more amino acid residue is an artificial chemical analogue of a corresponding naturally occurring amino acid, as well as to naturally occurring amino acid polymers.

[0065] As used herein “promoter” includes reference to a region of DNA upstream from the start of transcription and involved in recognition and binding of RNA polymerase and other proteins to initiate transcription. A “plant promoter” is a promoter capable of initiating transcription in plant cells. Exemplary plant promoters include, but are not limited to, those that are obtained from plants, plant viruses and bacteria which comprise genes expressed in plant cells such Agrobacterium or Rhizobium. Examples are promoters that preferentially initiate transcription in certain tissues, such as leaves, roots, seeds, fibres, xylem vessels, tracheids or sclerenchyma. Such promoters are referred to as “tissue preferred.” A “cell type” specific promoter primarily drives expression in certain cell types in one or more organs, for example, vascular cells in roots or leaves. An “inducible” or “regulatable” promoter is a promoter, which is under environmental control. Examples of environmental conditions that may affect transcription by inducible promoters include anaerobic conditions or the presence of light. Another type of promoter is a developmentally regulated promoter, for example, a promoter that drives expression during pollen development. Tissue preferred, cell type specific, developmentally regulated and inducible promoters constitute the class of “non-constitutive” promoters. A “constitutive” promoter is a promoter, which is active under most environmental conditions.

[0066] The term “GS polypeptide” refers to one or more amino acid sequences. The term is also inclusive of fragments, variants, homologs, alleles or precursors (e.g., preproproteins or proproteins) thereof. A “GS protein” comprises a Glutamine Synthetase polypeptide. Unless otherwise stated, the term “GS nucleic acid” means a nucleic acid comprising a polynucleotide (“GS polynucleotide”) encoding a Glutamine Synthetase polypeptide.

[0067] As used herein “recombinant” includes reference to a cell or vector, that has been modified by the introduction of a heterologous nucleic acid or that the cell is derived from a cell so modified. Thus, for example, recombinant cells express genes that are not found in identical form within the native (non-recombinant) form of the cell or express native genes that are otherwise abnormally expressed, under expressed or not expressed at all as a result of deliberate human intervention; or may have reduced or eliminated expression of a native gene. The term “recombinant” as used herein does not encompass the alteration of the cell or vector by naturally occurring events (e.g., spontaneous mutation, natural transformation/transduction/transposition) such as those occurring without deliberate human intervention.

[0068] As used herein, a “recombinant expression cassette” is a nucleic acid construct, generated recombinantly or synthetically, with a series of specified nucleic acid elements, which permit transcription of a particular nucleic acid in a target cell. The recombinant expression cassette can be incorporated into a plasmid, chromosome, mitochondrial DNA, plastid DNA, virus or nucleic acid fragment. Typically, the recombinant expression cassette portion of an expression vector includes, among other sequences, a nucleic acid to be transcribed, and a promoter.

[0069] The term “residue” or “amino acid residue” or “amino acid” are used interchangeably herein to refer to an amino acid that is incorporated into a protein, polypeptide, or peptide (collectively “protein”). The amino acid may be a naturally occurring amino acid and, unless otherwise limited, may encompass known analogs of natural amino acids that can function in a similar manner as naturally occurring amino acids.

[0070] The term “selectively hybridizes” includes reference to hybridization, under stringent hybridization conditions, of a nucleic acid sequence to a specified nucleic acid target sequence to a detectably greater degree (e.g., at least 2-fold over background) than its hybridization to non-target nucleic acid sequences and to the substantial exclusion of non-target nucleic acids. Selectively hybridizing sequences typically have about at least 40% sequence identity, preferably 60-90% sequence identity and most preferably 100% sequence identity (i.e., complementary) with each other.

[0071] The terms “stringent conditions” or “stringent hybridization conditions” include reference to conditions under which a probe will hybridize to its target sequence, to a detectably greater degree than other sequences (e.g., at least 2-fold over background). Stringent conditions are sequence-dependent and will be different in different circumstances. By controlling the stringency of the hybridization and/or washing conditions, target sequences can be identified which can be up to 100% complementary to the probe (homologous probing). Alternatively, stringency conditions can be adjusted to allow some mismatching in sequences so that lower degrees of similarity are detected (heterologous probing). Optimally, the probe is approximately 500 nucleotides in length, but can vary greatly in length from less than 500 nucleotides to equal to the entire length of the target sequence.

[0072] Typically, stringent conditions will be those in which the salt concentration is less than about 1.5 M Na ion, typically about 0.01 to 1.0 M Na ion concentration (or other salts) at pH 7.0 to 8.3 and the temperature is at least about 30° C. for short probes (e.g., 10 to 50 nucleotides) and at least about 60° C. for long probes (e.g., greater than 50 nucleotides). Stringent conditions may also be achieved with the addition of destabilizing agents such as formamide or Denhardt's. Exemplary low stringency conditions include hybridization with a buffer solution of 30 to 35% formamide, 1M NaCl, 1% SDS (sodium dodecyl sulphate) at 37° C. and a wash in 1× to 2×SSC (20×SSC=3.0 M NaCl/0.3 M trisodium citrate) at 50 to 55° C. Exemplary moderate stringency conditions include hybridization in 40 to 45% formamide, 1M NaCl, 1% SDS at 37° C. and a wash in 0.5× to 1×SSC at 55 to 60° C. Exemplary high stringency conditions include hybridization in 50% formamide, 1M NaCl, 1% SDS at 37° C. and a wash in 0.1×SSC at 60 to 65° C. Specificity is typically the function of post-hybridization washes, the critical factors being the ionic strength and temperature of the final wash solution. For DNA-DNA hybrids, the Tₘ can be approximated from the equation of Meinkoth and Wahl, (1984) Anal. Biochem., 138:267-84: Tₘ=81.5° C.+16.6 (log M)+0.41 (% GC)-0.61 (% form)-500/L; where M is the molarity of monovalent cations, % GC is the percentage of guanosine and cytosine nucleotides in the DNA, % form is the percentage of formamide in the hybridization solution and L is the length of the hybrid in base pairs. The Tₘ is the temperature (under defined ionic strength and pH) at which 50% of a complementary target sequence hybridizes to a perfectly matched probe. Tₘ is reduced by about 1° C. for each 1% of mismatching; thus, Tₘ, hybridization and/or wash conditions can be adjusted to hybridize to sequences of the desired identity. For example, if sequences with ≧90% identity are sought, the Tₘ can be decreased 10° C. Generally, stringent conditions are selected to be about 5° C. lower than the thermal melting point (Tₘ) for the specific sequence and its complement at a defined ionic strength and pH. However, severely stringent conditions can utilize a hybridization and/or wash at 1, 2, 3 or 4° C. lower than the thermal melting point (Tₘ); moderately stringent conditions can utilize a hybridization and/or wash at 6, 7, 8, 9 or 10° C. lower than the thermal melting point (Tₘ); low stringency conditions can utilize a hybridization and/or wash at 11, 12, 13, 14, 15 or 20° C. lower than the thermal melting point (Tₘ). Using the equation, hybridization and wash compositions, and desired Tₘ, those of ordinary skill will understand that variations in the stringency of hybridization and/or wash solutions are inherently described. If the desired degree of mismatching results in a Tₘ of less than 45° C. (aqueous solution) or 32° C. (formamide solution) it is preferred to increase the SSC concentration so that a higher temperature can be used. An extensive guide to the hybridization of nucleic acids is found in Tijssen, LABORATORY TECHNIQUES IN BIOCHEMISTRY AND MOLECULAR BIOLOGY—HYBRIDIZATION WITH NUCLEIC ACID PROBES, part I, chapter 2, “Overview of principles of hybridization and the strategy of nucleic acid probe assays,” Elsevier, New York (1993); and CURRENT PROTOCOLS IN MOLECULAR BIOLOGY, chapter 2, Ausubel, et al., eds, Greene Publishing and Wiley-Interscience, New York (1995). Unless otherwise stated, in the present application high stringency is defined as hybridization in 4×SSC, 5×Denhardt's (5 g Ficoll, 5 g polyvinypyrrolidone, 5 g bovine serum albumin in 500 ml of water), 0.1 mg/ml boiled salmon sperm DNA and 25 mM Na phosphate at 65° C., and a wash in 0.1×SSC, 0.1% SDS at 65° C.

[0073] As used herein, “transgenic plant” includes reference to a plant, which comprises within its genome a heterologous polynucleotide. Generally, the heterologous polynucleotide is stably integrated within the genome such that the polynucleotide is passed on to successive generations. The heterologous polynucleotide may be integrated into the genome alone or as part of a recombinant expression cassette. “Transgenic” is used herein to include any cell, cell line, callus, tissue, plant part or plant, the genotype of which has been altered by the presence of heterologous nucleic acid including those transgenics initially so altered as well as those created by sexual crosses or asexual propagation from the initial transgenic. The term “transgenic” as used herein does not encompass the alteration of the genome (chromosomal or extra-chromosomal) by conventional plant breeding methods or by naturally occurring events such as random cross-fertilization, non-recombinant viral infection, non-recombinant bacterial transformation, non-recombinant transposition or spontaneous mutation.

[0074] As used herein, “vector” includes reference to a nucleic acid used in transfection of a host cell and into which can be inserted a polynucleotide. Vectors are often replicons. Expression vectors permit transcription of a nucleic acid inserted therein.

[0075] The following terms are used to describe the sequence relationships between two or more nucleic acids or polynucleotides or polypeptides: (a) “reference sequence,” (b) “comparison window,” (c) “sequence identity,” (d) “percentage of sequence identity” and (e) “substantial identity.”

[0076] As used herein, “reference sequence” is a defined sequence used as a basis for sequence comparison. A reference sequence may be a subset or the entirety of a specified sequence; for example, as a segment of a full-length cDNA or gene sequence or the complete cDNA or gene sequence.

[0077] As used herein, “comparison window” means includes reference to a contiguous and specified segment of a polynucleotide sequence, wherein the polynucleotide sequence may be compared to a reference sequence and wherein the portion of the polynucleotide sequence in the comparison window may comprise additions or deletions (i.e., gaps) compared to the reference sequence (which does not comprise additions or deletions) for optimal alignment of the two sequences. Generally, the comparison window is at least 20 contiguous nucleotides in length, and optionally can be 30, 40, 50, 100 or longer. Those of skill in the art understand that to avoid a high similarity to a reference sequence due to inclusion of gaps in the polynucleotide sequence a gap penalty is typically introduced and is subtracted from the number of matches.

[0078] Methods of alignment of nucleotide and amino acid sequences for comparison are well known in the art. The local homology algorithm (BESTFIT) of Smith and Waterman, (1981) Adv. Appl. Math 2:482, may conduct optimal alignment of sequences for comparison; by the homology alignment algorithm (GAP) of Needleman and Wunsch, (1970) J. Mol. Biol. 48:443-53; by the search for similarity method (Tfasta and Fasta) of Pearson and Lipman, (1988) Proc. Natl. Acad. Sci. USA 85:2444; by computerized implementations of these algorithms, including, but not limited to: CLUSTAL in the PC/Gene program by Intelligenetics, Mountain View, Calif., GAP, BESTFIT, BLAST, FASTA and TFASTA in the Wisconsin Genetics Software Package®, Version 8 (available from Genetics Computer Group (GCG® programs (Accelrys, Inc., San Diego, Calif.)). The CLUSTAL program is well described by Higgins and Sharp, (1988) Gene 73:237-44; Higgins and Sharp, (1989) CABIOS 5:151-3; Corpet, et al., (1988) Nucleic Acids Res. 16:10881-90; Huang, et al., (1992) Computer Applications in the Biosciences 8:155-65, and Pearson, et al., (1994) Meth. Mol. Biol. 24:307-31. The preferred program to use for optimal global alignment of multiple sequences is PileUp (Feng and Doolittle, (1987) J. Mol. Evol., 25:351-60 which is similar to the method described by Higgins and Sharp, (1989) CABIOS 5:151-53 and hereby incorporated by reference). The BLAST family of programs which can be used for database similarity searches includes: BLASTN for nucleotide query sequences against nucleotide database sequences; BLASTX for nucleotide query sequences against protein database sequences; BLASTP for protein query sequences against protein database sequences; TBLASTN for protein query sequences against nucleotide database sequences; and TBLASTX for nucleotide query sequences against nucleotide database sequences. See, CURRENT PROTOCOLS IN MOLECULAR BIOLOGY, Chapter 19, Ausubel, et al., eds., Greene Publishing and Wiley-Interscience, New York (1995).

[0079] GAP uses the algorithm of Needleman and Wunsch, supra, to find the alignment of two complete sequences that maximizes the number of matches and minimizes the number of gaps. GAP considers all possible alignments and gap positions and creates the alignment with the largest number of matched bases and the fewest gaps. It allows for the provision of a gap creation penalty and a gap extension penalty in units of matched bases. GAP must make a profit of gap creation penalty number of matches for each gap it inserts. If a gap extension penalty greater than zero is chosen, GAP must, in addition, make a profit for each gap inserted of the length of the gap times the gap extension penalty. Default gap creation penalty values and gap extension penalty values in Version 10 of the Wisconsin Genetics Software Package® are 8 and 2, respectively. The gap creation and gap extension penalties can be expressed as an integer selected from the group of integers consisting of from 0 to 100. Thus, for example, the gap creation and gap extension penalties can be 0, 1, 2, 3, 4, 5, 6, 7, 8, 9, 10, 15, 20, 30, 40, 50 or greater.

[0080] GAP presents one member of the family of best alignments. There may be many members of this family, but no other member has a better quality. GAP displays four figures of merit for alignments: Quality, Ratio, Identity and Similarity. The Quality is the metric maximized in order to align the sequences. Ratio is the quality divided by the number of bases in the shorter segment. Percent Identity is the percent of the symbols that actually match. Percent Similarity is the percent of the symbols that are similar. Symbols that are across from gaps are ignored. A similarity is scored when the scoring matrix value for a pair of symbols is greater than or equal to 0.50, the similarity threshold. The scoring matrix used in Version 10 of the Wisconsin Genetics Software Package® is BLOSUM62 (see, Henikoff and Henikoff, (1989) Proc. Natl. Acad. Sci. USA 89:10915).

[0081] Unless otherwise stated, sequence identity/similarity values provided herein refer to the value obtained using the BLAST 2.0 suite of programs using default parameters (Altschul, et al., (1997) Nucleic Acids Res. 25:3389-402).

[0082] As those of ordinary skill in the art will understand, BLAST searches assume that proteins can be modeled as random sequences. However, many real proteins comprise regions of nonrandom sequences, which may be homopolymeric tracts, short-period repeats or regions enriched in one or more amino acids. Such low-complexity regions may be aligned between unrelated proteins even though other regions of the protein are entirely dissimilar. A number of low-complexity filter programs can be employed to reduce such low-complexity alignments. For example, the SEG (Wooten and Federhen, (1993) Comput. Chem. 17:149-63) and XNU (Claverie and States, (1993) Comput. Chem. 17:191-201) low-complexity filters can be employed alone or in combination.

[0083] As used herein, “sequence identity” or “identity” in the context of two nucleic acid or polypeptide sequences includes reference to the residues in the two sequences, which are the same when aligned for maximum correspondence over a specified comparison window. When percentage of sequence identity is used in reference to proteins it is recognized that residue positions which are not identical often differ by conservative amino acid substitutions, where amino acid residues are substituted for other amino acid residues with similar chemical properties (e.g., charge or hydrophobicity) and therefore do not change the functional properties of the molecule. Where sequences differ in conservative substitutions, the percent sequence identity may be adjusted upwards to correct for the conservative nature of the substitution. Sequences, which differ by such conservative substitutions, are said to have “sequence similarity” or “similarity.” Means for making this adjustment are well known to those of skill in the art. Typically this involves scoring a conservative substitution as a partial rather than a full mismatch, thereby increasing the percentage sequence identity. Thus, for example, where an identical amino acid is given a score of 1 and a non-conservative substitution is given a score of zero, a conservative substitution is given a score between zero and 1. The scoring of conservative substitutions is calculated, e.g., according to the algorithm of Meyers and Miller, (1988) Computer Applic. Biol. Sci. 4:11-17, e.g., as implemented in the program PC/GENE (Intelligenetics, Mountain View, Calif., USA).

[0084] As used herein, “percentage of sequence identity” means the value determined by comparing two optimally aligned sequences over a comparison window, wherein the portion of the polynucleotide sequence in the comparison window may comprise additions or deletions (i.e., gaps) as compared to the reference sequence (which does not comprise additions or deletions) for optimal alignment of the two sequences. The percentage is calculated by determining the number of positions at which the identical nucleic acid base or amino acid residue occurs in both sequences to yield the number of matched positions, dividing the number of matched positions by the total number of positions in the window of comparison and multiplying the result by 100 to yield the percentage of sequence identity.

[0085] The term “substantial identity” of polynucleotide sequences means that a polynucleotide comprises a sequence that has between 50-100% sequence identity, preferably at least 50% sequence identity, preferably at least 60% sequence identity, preferably at least 70%, more preferably at least 80%, more preferably at least 90% and most preferably at least 95%, compared to a reference sequence using one of the alignment programs described using standard parameters. One of skill will recognize that these values can be appropriately adjusted to determine corresponding identity of proteins encoded by two nucleotide sequences by taking into account codon degeneracy, amino acid similarity, reading frame positioning and the like. Substantial identity of amino acid sequences for these purposes normally means sequence identity of between 55-100%, preferably at least 55%, preferably at least 60%, more preferably at least 70%, 80%, 90% and most preferably at least 95%.

[0086] Another indication that nucleotide sequences are substantially identical is if two molecules hybridize to each other under stringent conditions. The degeneracy of the genetic code allows for many amino acids substitutions that lead to variety in the nucleotide sequence that code for the same amino acid, hence it is possible that the DNA sequence could code for the same polypeptide but not hybridize to each other under stringent conditions. This may occur, e.g., when a copy of a nucleic acid is created using the maximum codon degeneracy permitted by the genetic code. One indication that two nucleic acid sequences are substantially identical is that the polypeptide, which the first nucleic acid encodes, is immunologically cross reactive with the polypeptide encoded by the second nucleic acid.

[0087] The terms “substantial identity” in the context of a peptide indicates that a peptide comprises a sequence with between 55-100% sequence identity to a reference sequence preferably at least 55% sequence identity, preferably 60% preferably 70%, more preferably 80%, most preferably at least 90% or 95% sequence identity to the reference sequence over a specified comparison window. Preferably, optimal alignment is conducted using the homology alignment algorithm of Needleman and Wunsch, supra. An indication that two peptide sequences are substantially identical is that one peptide is immunologically reactive with antibodies raised against the second peptide. Thus, a peptide is substantially identical to a second peptide, for example, where the two peptides differ only by a conservative substitution. In addition, a peptide can be substantially identical to a second peptide when they differ by a non-conservative change if the epitope that the antibody recognizes is substantially identical. Peptides, which are “substantially similar” share sequences as, noted above except that residue positions, which are not identical, may differ by conservative amino acid changes.

[0088] The invention discloses urea transporter, urease and glutamine synthetase polynucleotides and polypeptides. The novel nucleotides and proteins of the invention have an expression pattern which indicates that they regulate nitrogen transport and thus play an important role in plant development. The polynucleotides are expressed in various plant tissues. The polynucleotides and polypeptides thus provide an opportunity to manipulate plant development to alter seed and vegetative tissue development, timing or composition. This may be used to create a plant with altered N composition in source and sink.

### Nucleic Acids

[0089] The present invention provides, inter alia, isolated nucleic acids of RNA, DNA and analogs and/or chimeras thereof, comprising a urea transporter, urease or glutamine synthetase polynucleotide.

[0090] The present invention also includes polynucleotides optimized for expression in different organisms. For example, for expression of the polynucleotide in a maize plant, the sequence can be altered to account for specific codon preferences and to alter GC content as according to Murray, et al., supra. Maize codon usage for 28 genes from maize plants is listed in Table 4 of Murray et al., supra.

[0091] The urea transporter, urease, and glutamine synthetase nucleic acids of the present invention comprise isolated urea transporter, urease and glutamine synthetase polynucleotides which are inclusive of:
[0092] (a) a polynucleotide encoding a urea transporter, urease or glutamine synthetase polypeptide and conservatively modified and polymorphic variants thereof;
[0093] (b) a polynucleotide having at least 70% sequence identity with polynucleotides of (a) or (b);
[0094] (c) complementary sequences of polynucleotides of (a) or (b).

### Construction of Nucleic Acids

[0095] The isolated nucleic acids of the present invention can be made using (a) standard recombinant methods, (b) synthetic techniques or combinations thereof. In some embodiments, the polynucleotides of the present invention will be cloned, amplified or otherwise constructed from a fungus or bacteria.

[0096] The nucleic acids may conveniently comprise sequences in addition to a polynucleotide of the present invention. For example, a multi-cloning site comprising one or more endonuclease restriction sites may be inserted into the nucleic acid to aid in isolation of the polynucleotide. Also, translatable sequences may be inserted to aid in the isolation of the translated polynucleotide of the present invention. For example, a hexa-histidine marker sequence provides a convenient means to purify the proteins of the present invention. The nucleic acid of the present invention—excluding the polynucleotide sequence—is optionally a vector, adapter or linker for cloning and/or expression of a polynucleotide of the present invention. Additional sequences may be added to such cloning and/or expression sequences to optimize their function in cloning and/or expression, to aid in isolation of the polynucleotide or to improve the introduction of the polynucleotide into a cell. Typically, the length of a nucleic acid of the present invention less the length of its polynucleotide of the present invention is less than 20 kilobase pairs, often less than 15 kb, and frequently less than 10 kb. Use of cloning vectors, expression vectors, adapters and linkers is well known in the art. Exemplary nucleic acids include such vectors as: M13, lambda ZAP Express, lambda ZAP II, lambda gt10, lambda gt11, pBK-CMV, pBK-RSV, pBluescript II, lambda DASH II, lambda EMBL 3, lambda EMBL 4, pWE15, SuperCos 1, SurfZap, Uni-ZAP, pBC, pBS+/−, pSG5, pBK, pCR-Script, pET, pSPUTK, p3′SS, pGEM, pSK+/−, pGEX, pSPORTI and II, pOPRSVI CAT, pOPl3 CAT, pXT1, pSG5, pPbac, pMbac, pMC1neo, pOG44, pOG45, pFRTβGAL, pNEOβGAL, pRS403, pRS404, pRS405, pRS406, pRS413, pRS414, pRS415, pRS416, lambda MOSSIox and lambda MOSElox. Optional vectors for the present invention, include but are not limited to, lambda ZAP II and pGEX. For a description of various nucleic acids see, e.g., Stratagene Cloning Systems, Catalogs 1995, 1996, 1997 (La Jolla, Calif.); and, Amersham Life Sciences, Inc, Catalog '97 (Arlington Heights, Ill.).

### Synthetic Methods for Constructing Nucleic Acids

[0097] The isolated nucleic acids of the present invention can also be prepared by direct chemical synthesis by methods such as the phosphotriester method of Narang, et al., (1979) Meth. Enzymol. 68:90-9; the phosphodiester method of Brown, et al., (1979) Meth. Enzymol. 68:109-51; the diethylphosphoramidite method of Beaucage, et al., (1981) Tetra. Letts. 22(20):1859-62; the solid phase phosphoramidite triester method described by Beaucage, et al., supra, e.g., using an automated synthesizer, e.g., as described in Needham-VanDevanter, et al., (1984) Nucleic Acids Res. 12:6159-68 and the solid support method of U.S. Pat. No. 4,458,066. Chemical synthesis generally produces a single stranded oligonucleotide. This may be converted into double stranded DNA by hybridization with a complementary sequence or by polymerization with a DNA polymerase using the single strand as a template. One of skill will recognize that while chemical synthesis of DNA is limited to sequences of about 100 bases, longer sequences may be obtained by the ligation of shorter sequences.

### UTRs and Codon Preference

[0098] In general, translational efficiency has been found to be regulated by specific sequence elements in the 5′ non-coding or untranslated region (5′ UTR) of the RNA. Positive sequence motifs include translational initiation consensus sequences (Kozak, (1987) Nucleic Acids Res. 15:8125) and the 5<G>7 methyl GpppG RNA cap structure (Drummond, et al., (1985) Nucleic Acids Res. 13:7375). Negative elements include stable intramolecular 5′ UTR stem-loop structures (Muesing, et al., (1987) Cell 48:691) and AUG sequences or short open reading frames preceded by an appropriate AUG in the 5′ UTR (Kozak, supra, Rao, et al., (1988) Mol. and Cell. Biol. 8:284). Accordingly, the present invention provides 5′ and/or 3′ UTR regions for modulation of translation of heterologous coding sequences.

[0099] Further, the polypeptide-encoding segments of the polynucleotides of the present invention can be modified to alter codon usage. Altered codon usage can be employed to alter translational efficiency and/or to optimize the coding sequence for expression in a desired host or to optimize the codon usage in a heterologous sequence for expression in maize. Codon usage in the coding regions of the polynucleotides of the present invention can be analyzed statistically using commercially available software packages such as “Codon Preference” available from the University of Wisconsin Genetics Computer Group. See, Devereaux, et al., (1984) Nucleic Acids Res. 12:387-395 or MacVector 4.1 (Eastman Kodak Co., New Haven, Conn.). Thus, the present invention provides a codon usage frequency characteristic of the coding region of at least one of the polynucleotides of the present invention. The number of polynucleotides (3 nucleotides per amino acid) that can be used to determine a codon usage frequency can be any integer from 3 to the number of polynucleotides of the present invention as provided herein. Optionally, the polynucleotides will be full-length sequences. An exemplary number of sequences for statistical analysis can be at least 1, 5, 10, 20, 50 or 100.

### Sequence Shuffling

[0100] The present invention provides methods for sequence shuffling using polynucleotides of the present invention, and compositions resulting therefrom. Sequence shuffling is described in PCT Publication Number 1996/19256. See also, Zhang, et al., (1997) Proc. Natl. Acad. Sci. USA 94:4504-9 and Zhao, et al., (1998) Nature Biotech 16:258-61. Generally, sequence shuffling provides a means for generating libraries of polynucleotides having a desired characteristic, which can be selected or screened for. Libraries of recombinant polynucleotides are generated from a population of related sequence polynucleotides, which comprise sequence regions, which have substantial sequence identity and can be homologously recombined in vitro or in vivo. The population of sequence-recombined polynucleotides comprises a subpopulation of polynucleotides which possess desired or advantageous characteristics and which can be selected by a suitable selection or screening method. The characteristics can be any property or attribute capable of being selected for or detected in a screening system, and may include properties of: an encoded protein, a transcriptional element, a sequence controlling transcription, RNA processing, RNA stability, chromatin conformation, translation or other expression property of a gene or transgene, a replicative element, a protein-binding element, or the like, such as any feature which confers a selectable or detectable property. In some embodiments, the selected characteristic will be an altered Kₘ and/or K_{cat} over the wild-type protein as provided herein. In other embodiments, a protein or polynucleotide generated from sequence shuffling will have a ligand binding affinity greater than the non-shuffled wild-type polynucleotide. In yet other embodiments, a protein or polynucleotide generated from sequence shuffling will have an altered pH optimum as compared to the non-shuffled wild-type polynucleotide. The increase in such properties can be at least 110%, 120%, 130%, 140% or greater than 150% of the wild-type value.

### Recombinant Expression Cassettes

[0101] The present invention further provides recombinant expression cassettes comprising a nucleic acid of the present invention. A nucleic acid sequence coding for the desired polynucleotide of the present invention, for example a cDNA or a genomic sequence encoding a polypeptide long enough to code for an active protein of the present invention, can be used to construct a recombinant expression cassette which can be introduced into the desired host cell. A recombinant expression cassette will typically comprise a polynucleotide of the present invention operably linked to transcriptional initiation regulatory sequences which will direct the transcription of the polynucleotide in the intended host cell, such as tissues of a transformed plant.

[0102] For example, plant expression vectors may include (1) a cloned plant gene under the transcriptional control of 5′ and 3′ regulatory sequences and (2) a dominant selectable marker. Such plant expression vectors may also contain, if desired, a promoter regulatory region (e.g., one conferring inducible or constitutive, environmentally- or developmentally-regulated or cell- or tissue-specific/selective expression), a transcription initiation start site, a ribosome binding site, an RNA processing signal, a transcription termination site and/or a polyadenylation signal.

[0103] A plant promoter fragment can be employed which will direct expression of a polynucleotide of the present invention in all tissues of a regenerated plant. Such promoters are referred to herein as “constitutive” promoters and are active under most environmental conditions and states of development or cell differentiation. Examples of constitutive promoters include the 1′- or 2′-promoter derived from T-DNA of Agrobacterium tumefaciens, the Smas promoter, the cinnamyl alcohol dehydrogenase promoter (U.S. Pat. No. 5,683,439), the Nos promoter, the rubisco promoter, the GRP1-8 promoter, the 35S promoter from cauliflower mosaic virus (CaMV), as described in Odell, et al., (1985) Nature 313:810-2; rice actin (McElroy, et al., (1990) Plant Cell 163-171); ubiquitin (Christensen, et al., (1992) Plant Mol. Biol. 12:619-632 and Christensen, et al., (1992) Plant Mol. Biol. 18:675-89); pEMU (Last, et al., (1991) Theor. Appl. Genet. 81:581-8); MAS (Velten, et al., (1984) EMBO J. 3:2723-30) and maize H3 histone (Lepetit, et al., (1992) Mol. Gen. Genet. 231:276-85 and Atanassvoa, et al., (1992) Plant Journal 2(3):291-300); ALS promoter, as described in PCT Application Number WO 1996/30530 and other transcription initiation regions from various plant genes known to those of skill. For the present invention ubiquitin is the preferred promoter for expression in monocot plants.

[0104] Alternatively, the plant promoter can direct expression of a polynucleotide of the present invention in a specific tissue or may be otherwise under more precise environmental or developmental control. Such promoters are referred to here as “inducible” promoters. Environmental conditions that may affect transcription by inducible promoters include pathogen attack, anaerobic conditions or the presence of light. Examples of inducible promoters are the Adh1 promoter, which is inducible by hypoxia or cold stress, the Hsp70 promoter, which is inducible by heat stress and the PPDK promoter, which is inducible by light.

[0105] Examples of promoters under developmental control include promoters that initiate transcription only, or preferentially, in certain tissues, such as leaves, roots, fruit, seeds or flowers. The operation of a promoter may also vary depending on its location in the genome. Thus, an inducible promoter may become fully or partially constitutive in certain locations.

[0106] If polypeptide expression is desired, it is generally desirable to include a polyadenylation region at the 3′-end of a polynucleotide coding region. The polyadenylation region can be derived from a variety of plant genes or from T-DNA. The 3′ end sequence to be added can be derived from, for example, the nopaline synthase or octopine synthase genes or alternatively from another plant gene or less preferably from any other eukaryotic gene. Examples of such regulatory elements include, but are not limited to, 3′ termination and/or polyadenylation regions such as those of the Agrobacterium tumefaciens nopaline synthase (nos) gene (Bevan, et al., (1983) Nucleic Acids Res. 12:369-85); the potato proteinase inhibitor II (PINII) gene (Keil, et al., (1986) Nucleic Acids Res. 14:5641-50 and An, et al., (1989) Plant Cell 1:115-22) and the CaMV 19S gene (Mogen, et al., (1990) Plant Cell 2:1261-72).

[0107] An intron sequence can be added to the 5′ untranslated region or the coding sequence of the partial coding sequence to increase the amount of the mature message that accumulates in the cytosol. Inclusion of a spliceable intron in the transcription unit in both plant and animal expression constructs has been shown to increase gene expression at both the mRNA and protein levels up to 1000-fold (Buchman and Berg, (1988) Mol. Cell Biol. 8:4395-4405; Callis, et al., (1987) Genes Dev. 1:1183-200). Such intron enhancement of gene expression is typically greatest when placed near the 5′ end of the transcription unit. Use of maize introns Adh1-S intron 1, 2, and 6, the Bronze-1 intron are known in the art. See generally, THE MAIZE HANDBOOK, Chapter 116, Freeling and Walbot, eds., Springer, New York (1994).

[0108] Plant signal sequences, including, but not limited to, signal-peptide encoding DNA/RNA sequences which target proteins to the extracellular matrix of the plant cell (Dratewka-Kos, et al., (1989) J. Biol. Chem. 264:4896-900), such as the Nicotiana plumbaginifolia extension gene (DeLoose, et al., (1991) Gene 99:95-100); signal peptides which target proteins to the vacuole, such as the sweet potato sporamin gene (Matsuka, et al., (1991) Proc. Natl. Acad. Sci. USA 88:834) and the barley lectin gene (Wilkins, et al., (1990) Plant Cell, 2:301-13); signal peptides which cause proteins to be secreted, such as that of PR1b (Lind, et al., (1992) Plant Mol. Biol. 18:47-53) or the barley alpha amylase (BAA) (Rahmatullah, et al., (1989) Plant Mol. Biol. 12:119, and hereby incorporated by reference) or signal peptides which target proteins to the plastids such as that of rapeseed enoyl-Acp reductase (Verwaert, et al., (1994) Plant Mol. Biol. 26:189-202) are useful in the invention. The barley alpha amylase signal sequence fused to the urease polynucleotide is the preferred construct for expression in maize for the present invention.

[0109] The vector comprising the sequences from a polynucleotide of the present invention will typically comprise a marker gene, which confers a selectable phenotype on plant cells. Usually, the selectable marker gene will encode antibiotic resistance, with suitable genes including genes coding for resistance to the antibiotic spectinomycin (e.g., the aada gene), the streptomycin phosphotransferase (SPT) gene coding for streptomycin resistance, the neomycin phosphotransferase (NPTII) gene encoding kanamycin or geneticin resistance, the hygromycin phosphotransferase (HPT) gene coding for hygromycin resistance, genes coding for resistance to herbicides which act to inhibit the action of acetolactate synthase (ALS), in particular the sulfonylurea-type herbicides (e.g., the acetolactate synthase (ALS) gene containing mutations leading to such resistance in particular the S4 and/or Hra mutations), genes coding for resistance to herbicides which act to inhibit action of glutamine synthase, such as phosphinothricin or basta (e.g., the bar gene), or other such genes known in the art. The bar gene encodes resistance to the herbicide basta and the ALS gene encodes resistance to the herbicide chlorsulfuron.

[0110] Typical vectors useful for expression of genes in higher plants are well known in the art and include vectors derived from the tumor-inducing (Ti) plasmid of Agrobacterium tumefaciens described by Rogers, et al., (1987) Meth. Enzymol. 153:253-77. These vectors are plant integrating vectors in that on transformation, the vectors integrate a portion of vector DNA into the genome of the host plant. Exemplary A. tumefaciens vectors useful herein are plasmids pKYLX6 and pKYLX7 of Schardl, et al., (1987) Gene 61:1-11 and Berger, et al., (1989) Proc. Natl. Acad. Sci. USA, 86:8402-6. Another useful vector herein is plasmid pBI101.2 that is available from CLONTECH Laboratories, Inc. (Palo Alto, Calif.).

### Expression of Proteins in Host Cells

[0111] Using the nucleic acids of the present invention, one may express a protein of the present invention in a recombinantly engineered cell such as bacteria, yeast, insect, mammalian or preferably plant cells. The cells produce the protein in a non-natural condition (e.g., in quantity, composition, location and/or time), because they have been genetically altered through human intervention to do so.

[0112] It is expected that those of skill in the art are knowledgeable in the numerous expression systems available for expression of a nucleic acid encoding a protein of the present invention. No attempt to describe in detail the various methods known for the expression of proteins in prokaryotes or eukaryotes will be made.

[0113] In brief summary, the expression of isolated nucleic acids encoding a protein of the present invention will typically be achieved by operably linking, for example, the DNA or cDNA to a promoter (which is either constitutive or inducible), followed by incorporation into an expression vector. The vectors can be suitable for replication and integration in either prokaryotes or eukaryotes. Typical expression vectors contain transcription and translation terminators, initiation sequences and promoters useful for regulation of the expression of the DNA encoding a protein of the present invention. To obtain high level expression of a cloned gene, it is desirable to construct expression vectors which contain, at the minimum, a strong promoter, such as ubiquitin, to direct transcription, a ribosome binding site for translational initiation and a transcription/translation terminator. Constitutive promoters are classified as providing for a range of constitutive expression. Thus, some are weak constitutive promoters and others are strong constitutive promoters. Generally, by “weak promoter” is intended a promoter that drives expression of a coding sequence at a low level. By “low level” is intended at levels of about 1/10,000 transcripts to about 1/100,000 transcripts to about 1/500,000 transcripts. Conversely, a “strong promoter” drives expression of a coding sequence at a “high level,” or about 1/10 transcripts to about 1/100 transcripts to about 1/1,000 transcripts.

[0114] One of skill would recognize that modifications could be made to a protein of the present invention without diminishing its biological activity. Some modifications may be made to facilitate the cloning, expression or incorporation of the targeting molecule into a fusion protein. Such modifications are well known to those of skill in the art and include, for example, a methionine added at the amino terminus to provide an initiation site or additional amino acids (e.g., poly His) placed on either terminus to create conveniently located restriction sites or termination codons or purification sequences.

### Expression in Prokaryotes

[0115] Prokaryotic cells may be used as hosts for expression. Prokaryotes most frequently are represented by various strains of E. coli; however, other microbial strains may also be used. Commonly used prokaryotic control sequences which are defined herein to include promoters for transcription initiation, optionally with an operator, along with ribosome binding site sequences, include such commonly used promoters as the beta lactamase (penicillinase) and lactose (lac) promoter systems (Chang, et al., (1977) Nature 198:1056), the tryptophan (trp) promoter system (Goeddel, et al., (1980) Nucleic Acids Res. 8:4057) and the lambda derived P L promoter and N-gene ribosome binding site (Shimatake, et al., (1981) Nature 292:128). The inclusion of selection markers in DNA vectors transfected in E. coli is also useful. Examples of such markers include genes specifying resistance to ampicillin, tetracycline or chloramphenicol.

[0116] The vector is selected to allow introduction of the gene of interest into the appropriate host cell. Bacterial vectors are typically of plasmid or phage origin. Appropriate bacterial cells are infected with phage vector particles or transfected with naked phage vector DNA. If a plasmid vector is used, the bacterial cells are transfected with the plasmid vector DNA. Expression systems for expressing a protein of the present invention are available using Bacillus sp. and Salmonella (Palva, et al., (1983) Gene 22:229-35; Mosbach, et al., (1983) Nature 302:543-5). The pGEX-4T-1 plasmid vector from Pharmacia is the preferred E. coli expression vector for the present invention.

### Expression in Eukaryotes

[0117] A variety of eukaryotic expression systems such as yeast, insect cell lines, plant and mammalian cells, are known to those of skill in the art. As explained briefly below, the present invention can be expressed in these eukaryotic systems. In some embodiments, transformed/transfected plant cells, as discussed infra, are employed as expression systems for production of the proteins of the instant invention.

[0118] Synthesis of heterologous proteins in yeast is well known. Sherman, et al., METHODS IN YEAST GENETICS, Cold Spring Harbor Laboratory (1982) is a well recognized work describing the various methods available to produce the protein in yeast. Two widely utilized yeasts for production of eukaryotic proteins are Saccharomyces cerevisiae and Pichia pastoris. Vectors, strains and protocols for expression in Saccharomyces and Pichia are known in the art and available from commercial suppliers (e.g., Invitrogen). Suitable vectors usually have expression control sequences, such as promoters, including 3-phosphoglycerate kinase or alcohol oxidase and an origin of replication, termination sequences and the like as desired.

[0119] A protein of the present invention, once expressed, can be isolated from yeast by lysing the cells and applying standard protein isolation techniques to the lysates or the pellets. The monitoring of the purification process can be accomplished by using Western blot techniques or radioimmunoassay of other standard immunoassay techniques.

[0120] The sequences encoding proteins of the present invention can also be ligated to various expression vectors for use in transfecting cell cultures of, for instance, mammalian, insect or plant origin. Mammalian cell systems often will be in the form of monolayers of cells although mammalian cell suspensions may also be used. A number of suitable host cell lines capable of expressing intact proteins have been developed in the art, and include the HEK293, BHK21 and CHO cell lines. Expression vectors for these cells can include expression control sequences, such as an origin of replication, a promoter (e.g., the CMV promoter, a HSV tk promoter or pgk (phosphoglycerate kinase) promoter), an enhancer (Queen, et al., (1986) Immunol. Rev. 89:49) and necessary processing information sites, such as ribosome binding sites, RNA splice sites, polyadenylation sites (e.g., an SV40 large T Ag poly A addition site) and transcriptional terminator sequences. Other animal cells useful for production of proteins of the present invention are available, for instance, from the American Type Culture Collection Catalogue of Cell Lines and Hybridomas (7^{th} ed., 1992).

[0121] Appropriate vectors for expressing proteins of the present invention in insect cells are usually derived from the SF9 baculovirus. Suitable insect cell lines include mosquito larvae, silkworm, armyworm, moth and Drosophila cell lines such as a Schneider cell line (see, e.g., Schneider, (1987) J. Embryol. Exp. Morphol. 27:353-65).

[0122] As with yeast, when higher animal or plant host cells are employed, polyadenlyation or transcription terminator sequences are typically incorporated into the vector. An example of a terminator sequence is the polyadenlyation sequence from the bovine growth hormone gene. Sequences for accurate splicing of the transcript may also be included. An example of a splicing sequence is the VP1 intron from SV40 (Sprague, et al., (1983) J. Virol. 45:773-81). Additionally, gene sequences to control replication in the host cell may be incorporated into the vector such as those found in bovine papilloma virus type-vectors (Saveria-Campo, “Bovine Papilloma Virus DNA a Eukaryotic Cloning Vector,” in DNA CLONING: A PRACTICAL APPROACH, vol. II, Glover, ed., IRL Press, Arlington, Va., pp. 213-38 (1985)).

[0123] In addition, the gene for a urea transporter, urease, or glutamine synthetase placed in the appropriate plant expression vector can be used to transform plant cells. The polypeptide can then be isolated from plant callus or the transformed cells can be used to regenerate transgenic plants. Such transgenic plants can be harvested, and the appropriate tissues (seed or leaves, for example) can be subjected to large scale protein extraction and purification techniques.

### Plant Transformation Methods

[0124] Numerous methods for introducing foreign genes into plants are known and can be used to insert a urea transporter, urease, or glutamine synthetase polynucleotide into a plant host, including biological and physical plant transformation protocols. See, e.g., Miki et al., “Procedure for Introducing Foreign DNA into Plants,” in METHODS IN PLANT MOLECULAR BIOLOGY AND BIOTECHNOLOGY, Glick and Thompson, eds., CRC Press, Inc., Boca Raton, pp. 67-88 (1993). The methods chosen vary with the host plant, and include chemical transfection methods such as calcium phosphate, microorganism-mediated gene transfer such as Agrobacterium (Horsch, et al., (1985) Science 227:1229-31), electroporation, micro-injection and biolistic bombardment.

[0125] Expression cassettes and vectors and in vitro culture methods for plant cell or tissue transformation and regeneration of plants are known and available. See, e.g., Gruber, et al., “Vectors for Plant Transformation,” in METHODS IN PLANT MOLECULAR BIOLOGY AND BIOTECHNOLOGY, supra, pp. 89-119.

[0126] The isolated polynucleotides or polypeptides may be introduced into the plant by one or more techniques typically used for direct delivery into cells. Such protocols may vary depending on the type of organism, cell, plant or plant cell, i.e. monocot or dicot, targeted for gene modification. Suitable methods of transforming plant cells include microinjection (Crossway, et al., (1986) Biotechniques 4:320-334 and U.S. Pat. No. 6,300,543), electroporation (Riggs, et al., (1986) Proc. Natl. Acad. Sci. USA 83:5602-5606, direct gene transfer (Paszkowski, et al., (1984) EMBO J. 3:2717-2722) and ballistic particle acceleration (see, for example, Sanford, et al., U.S. Pat. No. 4,945,050; WO 1991/10725 and McCabe, et al., (1988) Biotechnology 6:923-926). Also see, Tomes, et al., Direct DNA Transfer into Intact Plant Cells Via Microprojectile Bombardment. pp. 197-213 in Plant Cell, Tissue and Organ Culture, Fundamental Methods. eds. Gamborg and Phillips, Springer-Verlag Berlin Heidelberg New York, 1995; U.S. Pat. No. 5,736,369 (meristem); Weissinger, et al., (1988) Ann. Rev. Genet. 22:421-477; Sanford, et al., (1987) Particulate Science and Technology 5:27-37 (onion); Christou, et al., (1988) Plant Physiol. 87:671-674 (soybean); Datta, et al., (1990) Biotechnology 8:736-740 (rice); Klein, et al., (1988) Proc. Natl. Acad. Sci. USA 85:4305-4309 (maize); Klein, et al., (1988) Biotechnology 6:559-563 (maize); WO 1991/10725 (maize); Klein, et al., (1988) Plant Physiol. 91:440-444 (maize); Fromm, et al., (1990) Biotechnology 8:833-839 and Gordon-Kamm, et al., (1990) Plant Ce112:603-618 (maize); Hooydaas-Van Slogteren and Hooykaas, (1984) Nature (London) 311:763-764; Bytebier, et al., (1987) Proc. Natl. Acad. Sci. USA 84:5345-5349 (Liliaceae); De Wet, et al., (1985) In The Experimental Manipulation of Ovule Tissues, ed. Chapman, et al., pp. 197-209 Longman, N Y (pollen); Kaeppler, et al., (1990) Plant Cell Reports 9:415-418 and Kaeppler, et al., (1992) Theor. Appl. Genet. 84:560-566 (whisker-mediated transformation); U.S. Pat. No. 5,693,512 (sonication); D'Halluin, et al., (1992) Plant Cell 4:1495-1505 (electroporation); Li, et al., (1993) Plant Cell Reports 12:250-255 and Christou and Ford (1995) Annals of Botany 75:407-413 (rice); Osjoda, et al., (1996) Nature Biotech. 14:745-750; Agrobacterium mediated maize transformation (U.S. Pat. No. 5,981,840); silicon carbide whisker methods (Frame, et al., (1994) Plant J. 6:941-948); laser methods (Guo, et al., (1995) Physiologia Plantarum 93:19-24); sonication methods (Bao, et al., (1997) Ultrasound in Medicine & Biology 23:953-959; Finer and Finer, (2000) Lett Appl Microbiol. 30:406-10; Amoah, et al., (2001) J Exp Bot 52:1135-42); polyethylene glycol methods (Krens, et al., (1982) Nature 296:72-77); protoplasts of monocot and dicot cells can be transformed using electroporation (Fromm, et al., (1985) Proc. Natl. Acad. Sci. USA 82:5824-5828) and microinjection (Crossway, et al., (1986) Mol. Gen. Genet. 202:179-185), all of which are herein incorporated by reference.

### Agrobacterium-Mediated Transformation

[0127] The most widely utilized method for introducing an expression vector into plants is based on the natural transformation system of Agrobacterium. A. tumefaciens and A. rhizogenes are plant pathogenic soil bacteria, which genetically transform plant cells. The Ti and Ri plasmids of A. tumefaciens and A. rhizogenes, respectively, carry genes responsible for genetic transformation of plants. See, e.g., Kado, (1991) Crit. Rev. Plant Sci. 10:1. Descriptions of the Agrobacterium vector systems and methods for Agrobacterium-mediated gene transfer are provided in Gruber, et al., supra; Miki, et al., supra and Moloney, et al., (1989) Plant Cell Reports 8:238.

[0128] Similarly, the gene can be inserted into the T-DNA region of a Ti or Ri plasmid derived from A. tumefaciens or A. rhizogenes, respectively. Thus, expression cassettes can be constructed as above, using these plasmids. Many control sequences are known which when coupled to a heterologous coding sequence and transformed into a host organism show fidelity in gene expression with respect to tissue/organ specificity of the original coding sequence. See, e.g., Benfey and Chua, (1989) Science 244:174-81. Particularly suitable control sequences for use in these plasmids are promoters for constitutive leaf-specific expression of the gene in the various target plants. Other useful control sequences include a promoter and terminator from the nopaline synthase gene (NOS). The NOS promoter and terminator are present in the plasmid pARC2, available from the American Type Culture Collection and designated ATCC 67238. If such a system is used, the virulence (vir) gene from either the Ti or Ri plasmid must also be present, either along with the T-DNA portion, or via a binary system where the vir gene is present on a separate vector. Such systems, vectors for use therein, and methods of transforming plant cells are described in U.S. Pat. No. 4,658,082; U.S. Pat. No. 913,914, filed Oct. 1, 1986, as referenced in U.S. Pat. No. 5,262,306, issued Nov. 16, 1993 and Simpson, et al., (1986) Plant Mol. Biol. 6:403-15 (also referenced in the '306 patent), all incorporated by reference in their entirety.

[0129] Once constructed, these plasmids can be placed into A. rhizogenes or A. tumefaciens and these vectors used to transform cells of plant species, which are ordinarily susceptible to Fusarium or Alternaria infection. Several other transgenic plants are also contemplated by the present invention including but not limited to soybean, corn, sorghum, alfalfa, rice, clover, cabbage, banana, coffee, celery, tobacco, cowpea, cotton, melon, switchgrass, myscanthus, triticale and pepper. The selection of either A. tumefaciens or A. rhizogenes will depend on the plant being transformed thereby. In general A. tumefaciens is the preferred organism for transformation. Most dicotyledonous plants, some gymnosperms, and a few monocotyledonous plants (e.g., certain members of the Liliales and Arales) are susceptible to infection with A. tumefaciens. A. rhizogenes also has a wide host range, embracing most dicots and some gymnosperms, which includes members of the Leguminosae, Compositae and Chenopodiaceae. Monocot plants can now be transformed with some success. EP Patent Application Number 604 662 A1 discloses a method for transforming monocots using Agrobacterium. EP Patent Application Number 672 752 A1 discloses a method for transforming monocots with Agrobacterium using the scutellum of immature embryos. Ishida, et al., discuss a method for transforming maize by exposing immature embryos to A. tumefaciens (Nature Biotechnology 14:745-50 (1996)).

[0130] Once transformed, these cells can be used to regenerate transgenic plants. For example, whole plants can be infected with these vectors by wounding the plant and then introducing the vector into the wound site. Any part of the plant can be wounded, including leaves, stems and roots. Alternatively, plant tissue, in the form of an explant, such as cotyledonary tissue or leaf disks, can be inoculated with these vectors, and cultured under conditions, which promote plant regeneration. Roots or shoots transformed by inoculation of plant tissue with A. rhizogenes or A. tumefaciens, containing the gene coding for the fumonisin degradation enzyme, can be used as a source of plant tissue to regenerate fumonisin-resistant transgenic plants, either via somatic embryogenesis or organogenesis. Examples of such methods for regenerating plant tissue are disclosed in Shahin, (1985) Theor. Appl. Genet. 69:235-40; U.S. Pat. No. 4,658,082; Simpson, et al., supra and U.S. Pat. Nos. 913,913 and 913,914, both filed Oct. 1, 1986, as referenced in U.S. Pat. No. 5,262,306, issued Nov. 16, 1993, the entire disclosures therein incorporated herein by reference.

### Direct Gene Transfer

[0131] Despite the fact that the host range for Agrobacterium-mediated transformation is broad, some major cereal crop species and gymnosperms have generally been recalcitrant to this mode of gene transfer, even though some success has recently been achieved in rice (Hiei, et al., (1994) The Plant Journal 6:271-82). Several methods of plant transformation, collectively referred to as direct gene transfer, have been developed as an alternative to Agrobacterium-mediated transformation.

[0132] A generally applicable method of plant transformation is microprojectile-mediated transformation, where DNA is carried on the surface of microprojectiles measuring about 1 to 4 μm. The expression vector is introduced into plant tissues with a biolistic device that accelerates the microprojectiles to speeds of 300 to 600 m/s which is sufficient to penetrate the plant cell walls and membranes (Sanford, et al., (1987) Part. Sci. Technol. 5:27; Sanford, (1988) Trends Biotech 6:299; Sanford, (1990) Physiol. Plant 79:206 and Klein, et al., (1992) Biotechnology 10:268).

[0133] Another method for physical delivery of DNA to plants is sonication of target cells as described in Zang, et al., (1991) BioTechnology 9:996. Alternatively, liposome or spheroplast fusions have been used to introduce expression vectors into plants. See, e.g., Deshayes, et al., (1985) EMBO J. 4:2731 and Christou, et al., (1987) Proc. Natl. Acad. Sci. USA 84:3962. Direct uptake of DNA into protoplasts using CaCl₂ precipitation, polyvinyl alcohol or poly-L-ornithine has also been reported. See, e.g., Hain, et al., (1985) Mol. Gen. Genet. 199:161 and Draper, et al., (1982) Plant Cell Physiol. 23:451.

[0134] Electroporation of protoplasts and whole cells and tissues has also been described. See, e.g., Donn, et al., (1990) in Abstracts of the VIIth Int'l. Congress on Plant Cell and Tissue Culture IAPTC, A2-38, p. 53; D'Halluin, et al., (1992) Plant Cell 4:1495-505 and Spencer, et al., (1994) Plant Mol. Biol. 24:51-61.

Increasing the Activity and/or Level of a Urea Transporter, Urease or Glutamine Synthetase Polypeptide

[0135] Methods are provided to increase the activity and/or level of the urea transporter, urease, and glutamine synthetase polypeptides of the invention. An increase in the level and/or activity of the urea transporter, urease, or glutamine synthetase polypeptide of the invention can be achieved by providing to the plant a urea transporter, urease or glutamine synthetase polypeptide. The urea transporter, urease or glutamine synthetase polypeptide can be provided by introducing the amino acid sequence encoding the urea transporter, urease or glutamine synthetase polypeptide into the plant, introducing into the plant a nucleotide sequence encoding a urea transporter, urease or glutamine synthetase polypeptide or alternatively by modifying a genomic locus encoding the urea transporter, urease or glutamine synthetase polypeptide of the invention.

[0136] As discussed elsewhere herein, many methods are known the art for providing a polypeptide to a plant including, but not limited to, direct introduction of the polypeptide into the plant, introducing into the plant (transiently or stably) a polynucleotide construct encoding a polypeptide having urea transport, urea breakdown or ammonia assimilation activity. It is also recognized that the methods of the invention may employ a polynucleotide that is not capable of directing, in the transformed plant, the expression of a protein or an RNA. Thus, the level and/or activity of a urea transporter, urease, or glutamine synthetase polypeptide may be increased by altering the gene encoding the urea transporter, urease, or glutamine synthetase polypeptide or its promoter. See, e.g., Kmiec, U.S. Pat. No. 5,565,350; Zarling, et al., PCT/US93/03868. Therefore mutagenized plants that carry mutations in urea transporter, urease, or glutamine synthetase genes, where the mutations increase expression of the urea transporter, urease, or glutamine synthetase gene or increase the urea transport, urea breakdown, or ammonia assimilation activity of the encoded polypeptide are provided.

### Modulating Root Development

[0137] Methods for modulating root development in a plant are provided. By “modulating root development” is intended any alteration in the development of the plant root when compared to a control plant. Such alterations in root development include, but are not limited to, alterations in the growth rate of the primary root, the fresh root weight, the extent of lateral and adventitious root formation, the vasculature system, meristem development or radial expansion.

[0138] Methods for modulating root development in a plant are provided. The methods comprise modulating the level and/or activity of the urea transporter, urease and glutamine synthetase polypeptide in the plant. In one method, a urea transporter, urease or glutamine synthetase sequence of the invention is provided to the plant. In another method, the urea transporter, urease, or glutamine synthetase nucleotide sequence is provided by introducing into the plant a polynucleotide comprising a urea transporter, urease or glutamine synthetase nucleotide sequence of the invention, expressing the urea transporter, urease or glutamine synthetase sequence and thereby modifying root development. In still other methods, the urea transporter, urease or glutamine synthetase nucleotide construct introduced into the plant is stably incorporated into the genome of the plant.

[0139] In other methods, root development is modulated by altering the level or activity of the urea transporter, urease or glutamine synthetase polypeptide in the plant. A change in urea transport, urea breakdown or ammonia assimilation activity can result in at least one or more of the following alterations to root development, including, but not limited to, larger root meristems, increased in root growth, enhanced radial expansion, an enhanced vasculature system, increased root branching, more adventitious roots and/or an increase in fresh root weight when compared to a control plant.

[0140] As used herein, “root growth” encompasses all aspects of growth of the different parts that make up the root system at different stages of its development in both monocotyledonous and dicotyledonous plants. It is to be understood that enhanced root growth can result from enhanced growth of one or more of its parts including the primary root, lateral roots, adventitious roots, etc.

[0141] Methods of measuring such developmental alterations in the root system are known in the art. See, for example, US Patent Application Publication Number 2003/0074698 and Werner, et al., (2001) PNAS 18:10487-10492, both of which are herein incorporated by reference.

[0142] As discussed above, one of skill will recognize the appropriate promoter to use to modulate root development in the plant. Exemplary promoters for this embodiment include constitutive promoters and root-preferred promoters. Exemplary root-preferred promoters have been disclosed elsewhere herein.

[0143] Stimulating root growth and increasing root mass by modulating the activity and/or level of the urea transporter, urease, or glutamine synthetase polypeptide also finds use in improving the standability of a plant. The term “resistance to lodging” or “standability” refers to the ability of a plant to fix itself to the soil. For plants with an erect or semi-erect growth habit, this term also refers to the ability to maintain an upright position under adverse (environmental) conditions. This trait relates to the size, depth and morphology of the root system. In addition, stimulating root growth and increasing root mass by modulating the level and/or activity of the urea transporter, urease, or glutamine synthetase polypeptide also finds use in promoting in vitro propagation of explants.

[0144] Furthermore, higher root biomass production due to an increased level and/or activity of urea transport, urea breakdown or ammonia assimilation activity has a direct effect on the yield and an indirect effect of production of compounds produced by root cells or transgenic root cells or cell cultures of said transgenic root cells. One example of an interesting compound produced in root cultures is shikonin, the yield of which can be advantageously enhanced by said methods.

[0145] Accordingly, the present invention further provides plants having modulated root development when compared to the root development of a control plant. In some embodiments, the plant of the invention has an increased level/activity of the urea transporter, urease or glutamine synthetase polypeptide of the invention and has enhanced root growth and/or root biomass. In other embodiments, such plants have stably incorporated into their genome a nucleic acid molecule comprising a urea transporter, urease or glutamine synthetase nucleotide sequence of the invention operably linked to a promoter that drives expression in the plant cell.

### Modulating Shoot and Leaf Development

[0146] Methods are also provided for modulating shoot and leaf development in a plant. By “modulating shoot and/or leaf development” is intended any alteration in the development of the plant shoot and/or leaf. Such alterations in shoot and/or leaf development include, but are not limited to, alterations in shoot meristem development, in leaf number, leaf size, leaf and stem vasculature, internode length and leaf senescence. As used herein, “leaf development” and “shoot development” encompasses all aspects of growth of the different parts that make up the leaf system and the shoot system, respectively, at different stages of their development, both in monocotyledonous and dicotyledonous plants. Methods for measuring such developmental alterations in the shoot and leaf system are known in the art. See, for example, Werner, et al., (2001) PNAS 98:10487-10492 and US Patent Application Publication Number 2003/0074698, each of which is herein incorporated by reference.

[0147] The method for modulating shoot and/or leaf development in a plant comprises modulating the activity and/or level of a urea transporter, urease or glutamine synthetase polypeptide of the invention. In one embodiment, a urea transporter, urease or glutamine synthetase sequence of the invention is provided. In other embodiments, the urea transporter, urease or glutamine synthetase nucleotide sequence can be provided by introducing into the plant a polynucleotide comprising a urea transporter, urease or glutamine synthetase nucleotide sequence of the invention, expressing the urea transporter, urease or glutamine synthetase sequence and thereby modifying shoot and/or leaf development. In other embodiments, the urea transporter, urease or glutamine synthetase nucleotide construct introduced into the plant is stably incorporated into the genome of the plant.

[0148] In specific embodiments, shoot or leaf development is modulated by increasing the level and/or activity of the urea transporter, urease or glutamine synthetase polypeptide in the plant. An increase in urea transport, urea breakdown or ammonia assimilation activity can result in at least one or more of the following alterations in shoot and/or leaf development, including, but not limited to, leaf number, leaf surface, vasculature, internode length and leaf senescence, when compared to a control plant.

[0149] As discussed above, one of skill will recognize the appropriate promoter to use to modulate shoot and leaf development of the plant. Exemplary promoters for this embodiment include constitutive promoters, shoot-preferred promoters, shoot meristem-preferred promoters and leaf-preferred promoters. Exemplary promoters have been disclosed elsewhere herein.

[0150] As discussed above, modulation urea transport, urea breakdown or ammonia assimilation activity in the plant modulates both root and shoot growth. Thus, the present invention further provides methods for altering the root/shoot ratio.

[0151] Accordingly, the present invention further provides plants having modulated shoot and/or leaf development when compared to a control plant. In some embodiments, the plant of the invention has an increased level/activity of the urea transporter, urease or glutamine synthetase polypeptide of the invention. In other embodiments, the plant of the invention has a decreased level/activity of the urea transporter, urease or glutamine synthetase polypeptide of the invention.

### Modulating Reproductive Tissue Development

[0152] Methods for modulating reproductive tissue development are provided. In one embodiment, methods are provided to modulate floral development in a plant. By “modulating floral development” is intended any alteration in a structure of a plant's reproductive tissue as compared to a control plant in which the activity or level of the urea transporter, urease, or glutamine synthetase polypeptide has not been modulated. “Modulating floral development” further includes any alteration in the timing of the development of a plant's reproductive tissue (i.e., a delayed or a accelerated timing of floral development) when compared to a control plant in which the activity or level of the urea transporter, urease or glutamine synthetase polypeptide has not been modulated. Macroscopic alterations may include changes in size, shape, number or location of reproductive organs, the developmental time period that these structures form or the ability to maintain or proceed through the flowering process in times of environmental stress. Microscopic alterations may include changes to the types or shapes of cells that make up the reproductive organs.

[0153] The method for modulating floral development in a plant comprises modulating urea transport, urea breakdown, or ammonia assimilation activity in a plant. In one method, a urea transporter, urease or glutamine synthetase sequence of the invention is provided. A urea transporter, urease or glutamine synthetase nucleotide sequence can be provided by introducing into the plant a polynucleotide comprising a urea transporter, urease or glutamine synthetase nucleotide sequence of the invention, expressing the urea transporter, urease or glutamine synthetase sequence and thereby modifying floral development. In other embodiments, the urea transporter, urease or glutamine synthetase nucleotide construct introduced into the plant is stably incorporated into the genome of the plant.

[0154] In specific methods, floral development is modulated by increasing the level or activity of the urea transporter, urease or glutamine synthetase polypeptide in the plant. An increase in urea transport, urea breakdown or ammonia assimilation activity can result in at least one or more of the following alterations in floral development, including, but not limited to, retarded flowering, reduced number of flowers, partial male sterility and reduced seed set, when compared to a control plant. Inducing delayed flowering or inhibiting flowering can be used to enhance yield in forage crops such as alfalfa. Methods for measuring such developmental alterations in floral development are known in the art. See, for example, Mouradov, et al., (2002) The Plant Cell S111-S130, herein incorporated by reference.

[0155] As discussed above, one of skill will recognize the appropriate promoter to use to modulate floral development of the plant. Exemplary promoters for this embodiment include constitutive promoters, inducible promoters, shoot-preferred promoters and inflorescence-preferred promoters.

[0156] Methods are also provided for the use of the urea transporter, urease or glutamine synthetase sequences of the invention to increase nitrogen use efficiency. The method comprises decreasing or increasing the activity of the urea transporter, urease or glutamine synthetase sequences in a plant or plant part, such as the roots, shoot, epidermal cells, etc.

[0157] As discussed above, one of skill will recognize the appropriate promoter to use to manipulate the expression of GS. Exemplary promoters of this embodiment include constitutive promoters, inducible promoters and root or shoot or leaf preferred promoters.

### Method of Use for Urea Transporter, Urease or Glutamine Synthetase Promoter Polynucleotides

[0158] The polynucleotides comprising the urea transporter, urease or glutamine synthetase promoters disclosed in the present invention, as well as variants and fragments thereof, are useful in the genetic manipulation of any host cell, preferably plant cell, when assembled with a DNA construct such that the promoter sequence is operably linked to a nucleotide sequence comprising a polynucleotide of interest. In this manner, the urea transporter, urease or glutamine synthetase promoter polynucleotides of the invention are provided in expression cassettes along with a polynucleotide sequence of interest for expression in the host cell of interest. Urea transporter, urease or glutamine synthetase promoter sequences of the invention are expressed in a variety of tissues and thus the promoter sequences can find use in regulating the temporal and/or the spatial expression of polynucleotides of interest.

[0159] Synthetic hybrid promoter regions are known in the art. Such regions comprise upstream promoter elements of one polynucleotide operably linked to the promoter element of another polynucleotide. In an embodiment of the invention, heterologous sequence expression is controlled by a synthetic hybrid promoter comprising the urea transporter, urease or glutamine synthetase promoter sequences of the invention or a variant or fragment thereof, operably linked to upstream promoter element(s) from a heterologous promoter. Upstream promoter elements that are involved in the plant defense system have been identified and may be used to generate a synthetic promoter. See, for example, Rushton, et al., (1998) Curr. Opin. Plant Biol. 1:311-315. Alternatively, a synthetic urea transporter, urease or glutamine synthetase promoter sequence may comprise duplications of the upstream promoter elements found within the urea transporter, urease or glutamine synthetase promoter sequences.

[0160] It is recognized that the promoter sequence of the invention may be used with its native urea transporter, urease or glutamine synthetase coding sequences. A DNA construct comprising the urea transporter, urease or glutamine synthetase promoter operably linked with its native urea transporter, urease or glutamine synthetase gene may be used to transform any plant of interest to bring about a desired phenotypic change, such as, modulating root, shoot, leaf, floral and embryo development, stress tolerance and any other phenotype described elsewhere herein.

[0161] The promoter nucleotide sequences and methods disclosed herein are useful in regulating expression of any heterologous nucleotide sequence in a host plant in order to vary the phenotype of a plant. Various changes in phenotype are of interest including modifying the fatty acid composition in a plant, altering the amino acid content of a plant, altering a plant's pathogen defense mechanism and the like. These results can be achieved by providing expression of heterologous products or increased expression of endogenous products in plants. Alternatively, the results can be achieved by providing for a reduction of expression of one or more endogenous products, particularly enzymes or cofactors in the plant. These changes result in a change in phenotype of the transformed plant.

[0162] Genes of interest are reflective of the commercial markets and interests of those involved in the development of the crop. Crops and markets of interest change, and as developing nations open up world markets, new crops and technologies will emerge also. In addition, as understanding of agronomic traits and characteristics such as yield and heterosis increase, the choice of genes for transformation will change accordingly. General categories of genes of interest include, for example, those genes involved in information, such as GSs, those involved in communication, such as kinases, and those involved in housekeeping, such as heat shock proteins. More specific categories of transgenes, for example, include genes encoding important traits for agronomics, insect resistance, disease resistance, herbicide resistance, sterility, grain characteristics and commercial products. Genes of interest include, generally, those involved in oil, starch, carbohydrate or nutrient metabolism as well as those affecting kernel size, sucrose loading and the like.

[0163] In certain embodiments the nucleic acid sequences of the present invention can be used in combination (“stacked”) with other polynucleotide sequences of interest in order to create plants with a desired phenotype. The combinations generated can include multiple copies of any one or more of the polynucleotides of interest. The polynucleotides of the present invention may be stacked with any gene or combination of genes to produce plants with a variety of desired trait combinations, including but not limited to traits desirable for animal feed such as high oil genes (e.g., U.S. Pat. No. 6,232,529); balanced amino acids (e.g., hordothionins (U.S. Pat. Nos. 5,990,389; 5,885,801; 5,885,802 and 5,703,409); barley high lysine (Williamson, et al., (1987) Eur. J. Biochem. 165:99-106 and WO 1998/20122) and high methionine proteins (Pedersen, et al., (1986) J. Biol. Chem. 261:6279; Kirihara, et al., (1988) Gene 71:359 and Musumura, et al., (1989) Plant Mol. Biol. 12:123)); increased digestibility (e.g., modified storage proteins (U.S. patent application Ser. No. 10/053,410, filed Nov. 7, 2001) and thioredoxins (U.S. patent application Ser. No. 10/005,429, filed Dec. 3, 2001)), the disclosures of which are herein incorporated by reference. The polynucleotides of the present invention can also be stacked with traits desirable for insect, disease or herbicide resistance (e.g., Bacillus thuringiensis toxic proteins (U.S. Pat. Nos. 5,366,892; 5,747,450; 5,737,514; 5723,756; 5,593,881; Geiser, et al., (1986) Gene 48:109); lectins (Van Damme, et al., (1994) Plant Mol. Biol. 24:825); fumonisin detoxification genes (U.S. Pat. No. 5,792,931); avirulence and disease resistance genes (Jones, et al., (1994) Science 266:789; Martin, et al., (1993) Science 262:1432; Mindrinos, et al., (1994) Cell 78:1089); acetolactate synthase (ALS) mutants that lead to herbicide resistance such as the S4 and/or Hra mutations; inhibitors of glutamine synthase such as phosphinothricin or basta (e.g., bar gene) and glyphosate resistance (EPSPS gene)) and traits desirable for processing or process products such as high oil (e.g., U.S. Pat. No. 6,232,529); modified oils (e.g., fatty acid desaturase genes (U.S. Pat. No. 5,952,544; WO 1994/11516)); modified starches (e.g., ADPG pyrophosphorylases (AGPase), starch synthases (SS), starch branching enzymes (SBE) and starch debranching enzymes (SDBE)) and polymers or bioplastics (e.g., U.S. Pat. No. 5,602,321; beta-ketothiolase, polyhydroxybutyrate synthase, and acetoacetyl-CoA reductase (Schubert, et al., (1988) J. Bacteriol. 170:5837-5847) facilitate expression of polyhydroxyalkanoates (PHAs)), the disclosures of which are herein incorporated by reference. One could also combine the polynucleotides of the present invention with polynucleotides affecting agronomic traits such as male sterility (e.g., see, U.S. Pat. No. 5,583,210), stalk strength, flowering time or transformation technology traits such as cell cycle regulation or gene targeting (e.g., WO 1999/61619; WO 2000/17364; WO 1999/25821), the disclosures of which are herein incorporated by reference.

[0164] In one embodiment, sequences of interest improve plant growth and/or crop yields. For example, sequences of interest include agronomically important genes that result in improved primary or lateral root systems. Such genes include, but are not limited to, nutrient/water transporters and growth induces. Examples of such genes, include but are not limited to, maize plasma membrane H⁺-ATPase (MHA2) (Frias, et al., (1996) Plant Cell 8:1533-44); AKT1, a component of the potassium uptake apparatus in Arabidopsis, (Spalding, et al., (1999) J Gen Physiol 113:909-18); RML genes which activate cell division cycle in the root apical cells (Cheng, et al., (1995) Plant Physiol 108:881); maize glutamine synthetase genes (Sukanya, et al., (1994) Plant Mol Biol 26:1935-46) and hemoglobin (Duff, et al., (1997) J. Biol. Chem. 27:16749-16752, Arredondo-Peter, et al., (1997) Plant Physiol. 115:1259-1266; Arredondo-Peter, et al., (1997) Plant Physiol 114:493-500 and references sited therein). The sequence of interest may also be useful in expressing sense nucleotide sequences of genes that that negatively affects root development.

[0165] Additional, agronomically important traits such as oil, starch, and protein content can be genetically altered in addition to using traditional breeding methods. Modifications include increasing content of oleic acid, saturated and unsaturated oils, increasing levels of lysine and sulfur, providing essential amino acids, and also modification of starch. Hordothionin protein modifications are described in U.S. Pat. Nos. 5,703,049, 5,885,801, 5,885,802 and 5,990,389, herein incorporated by reference. Another example is lysine and/or sulfur rich seed protein encoded by the soybean 2S albumin described in U.S. Pat. No. 5,850,016 and the chymotrypsin inhibitor from barley, described in Williamson, et al., (1987) Eur. J. Biochem. 165:99-106, the disclosures of which are herein incorporated by reference.

[0166] Derivatives of the coding sequences can be made by site-directed mutagenesis to increase the level of preselected amino acids in the encoded polypeptide. For example, the gene encoding the barley high lysine polypeptide (BHL) is derived from barley chymotrypsin inhibitor, U.S. patent application Ser. No. 08/740,682, filed Nov. 1, 1996 and WO 1998/20133, the disclosures of which are herein incorporated by reference. Other proteins include methionine-rich plant proteins such as from sunflower seed (Lilley, et al., (1989) Proceedings of the World Congress on Vegetable Protein Utilization in Human Foods and Animal Feedstuffs, ed. Applewhite (American Oil Chemists Society, Champaign, Ill.), pp. 497-502; herein incorporated by reference); corn (Pedersen, et al., (1986) J. Biol. Chem. 261:6279; Kirihara, et al., (1988) Gene 71:359; both of which are herein incorporated by reference) and rice (Musumura, et al., (1989) Plant Mol. Biol. 12:123, herein incorporated by reference). Other agronomically important genes encode latex, Floury 2, growth factors, seed storage factors and transcription factors.

[0167] Insect resistance genes may encode resistance to pests that have great yield drag such as rootworm, cutworm, European Corn Borer and the like. Such genes include, for example, Bacillus thuringiensis toxic protein genes (U.S. Pat. Nos. 5,366,892; 5,747,450; 5,736,514; 5,723,756; 5,593,881 and Geiser, et al., (1986) Gene 48:109), and the like.

[0168] Genes encoding disease resistance traits include detoxification genes, such as against fumonosin (U.S. Pat. No. 5,792,931); avirulence (avr) and disease resistance (R) genes (Jones, et al., (1994) Science 266:789; Martin, et al., (1993) Science 262:1432 and Mindrinos, et al., (1994) Cell 78:1089), and the like.

[0169] Herbicide resistance traits may include genes coding for resistance to herbicides that act to inhibit the action of acetolactate synthase (ALS), in particular the sulfonylurea-type herbicides (e.g., the acetolactate synthase (ALS) gene containing mutations leading to such resistance, in particular the S4 and/or Hra mutations), genes coding for resistance to herbicides that act to inhibit action of glutamine synthase, such as phosphinothricin or basta (e.g., the bar gene) or other such genes known in the art. The bar gene encodes resistance to the herbicide basta, the nptII gene encodes resistance to the antibiotics kanamycin and geneticin and the ALS-gene mutants encode resistance to the herbicide chlorsulfuron.

[0170] Sterility genes can also be encoded in an expression cassette and provide an alternative to physical detasseling. Examples of genes used in such ways include male tissue-preferred genes and genes with male sterility phenotypes such as QM, described in U.S. Pat. No. 5,583,210. Other genes include kinases and those encoding compounds toxic to either male or female gametophytic development.

[0171] The quality of grain is reflected in traits such as levels and types of oils, saturated and unsaturated, quality and quantity of essential amino acids, and levels of cellulose. In corn, modified hordothionin proteins are described in U.S. Pat. Nos. 5,703,049, 5,885,801, 5,885,802 and 5,990,389.

[0172] Commercial traits can also be encoded on a gene or genes that could increase for example, starch for ethanol production, or provide expression of proteins. Another important commercial use of transformed plants is the production of polymers and bioplastics such as described in U.S. Pat. No. 5,602,321. Genes such as 13-Ketothiolase, PHBase (polyhydroxyburyrate synthase) and acetoacetyl-CoA reductase (see, Schubert, et al., (1988) J. Bacteriol. 170:5837-5847) facilitate expression of polyhyroxyalkanoates (PHAs).

[0173] Exogenous products include plant enzymes and products as well as those from other sources including procaryotes and other eukaryotes. Such products include enzymes, cofactors, hormones and the like. The level of proteins, particularly modified proteins having improved amino acid distribution to improve the nutrient value of the plant, can be increased. This is achieved by the expression of such proteins having enhanced amino acid content.

[0174] This invention can be better understood by reference to the following non-limiting examples. It will be appreciated by those skilled in the art that other embodiments of the invention may be practiced without departing from the spirit and the scope of the invention as herein disclosed and claimed.

### EXAMPLES

### Example 1

[0175] Identification and phylogenetic analysis of potential urea transporter from maize and from diverse microbial and lower plant sources Proteins of several classes which possess the ability to translocate urea across biological membranes have been identified in a variety of species from bacteria to higher eukaryotes such as plants. Using a bioinformatic approach a number of genes were identified encoding potential homologues of the eukaryotic DUR3 high affinity urea transporter (SEQ ID NOS: 1-187), the prokaryotic UREI urea channel (SEQ ID NOS: 188-193), and the aquaporin-like NIP/TIP/PIP proteins (SEQ ID NOS: 194-223). Sequences of potential DUR3 homologues were obtained from a variety of sources, principally focused on microbes, fungi and lower photosynthetic plants and phylogenetic analysis was performed to examine the relationship among transporters (FIG. 3). The probable maize Dur3 homologue was also identified based on sequence homology to characterized urea transporters such as the Arabidopsis thaliana and Saccharomyces cerevisiae Dur3 proteins (Table 2)

TABLE 2

| | Arabidopsis | | |
|---|---|---|---|
| | thaliana | Zea mays | Saccharomyces |
| Species/Protein | Dur3 | Dur3 | cerevisiae Dur3 |
| Arabidopsis thaliana Dur3 | 1 | | |
| Zea mays Dur3 | 0.72 | 1 | |
| Saccharomyces cerevisiae | 0.35 | 0.34 | 1 |

| | |
|---|---|
| Dur3 | Percent Identity |

[0176] As would be expected for a transporter involved in urea import, qPCR analysis of root tissue from maize seedlings shows the ZmDur3 is induced by switching to growth media containing 10 mM urea as the sole nitrogen source when compared to plants grown in either no nitrogen or grown in constant amounts of nitrate (FIG. 4).

[0177] Genes encoding proteins highly similar to the Helicobacter pylori UREI urea channel were also identified using BLAST searches of publicly available databases, as this gene has previously been demonstrated to transport urea with good efficacy. A list of potential UREI homologues based on percent identity to the Helicobacter pylori Urel protein was also generated for subsequent testing (SEQ ID NOS: 190-193 Table 3).

TABLE 3

| | | | % Identity to |
|---|---|---|---|
| Organism | Description | Gene Annotation | HpUREI |
| Streptococcus_thermophilus | Lactic acid bacterium used | Urea channel | 58 |
| | for commercial purposes | | |
| | including production of milk | | |
| | and cheese; not pathogenic | | |
| Lactobacillus_ruminis | Lactic acid bacteriyum | AmiS/UreI transporter | 55 |
| | found normally in the | | |
| | intestine of humans and | | |
| | animals; not pathogenic and | | |
| | considered “probiotic” | | |
| Oxalobacter_formigenes | Oxalate-degrading | Urease accessory | 52 |
| | anaerobic bacterium found | protein UreI | |
| | in the large intestine of | | |
| | animals; not pathogenic and | | |
| | considered “probiotic” | | |
| Desulfotomaculum_nigrificans | Sulfate reducing anaerobic | AmiS/UreI transporter | 43 |
| | bacterium; found in soil and | | |
| | extreme environments; not | | |
| | pathogenic | | |

[0178] It has previously been demonstrated that a number of genes belonging to the aquaporin superfamily of channel proteins, the NIPs, TIPs and MIPs, possess the ability to transport urea across biological membranes. These relatively low affinity urea transporters are believed to be localized to both the plasma membrane of cells as well as to the membranes of internal storage structures such as the tonoplast and are possibly involved in urea uptake and urea release from storage sinks. Genes encoding proteins highly similar to the NIP, TIP and MIP low affinity urea channels were also identified using BLAST searches of proprietary and publicly available databases. A list of proteins previously shown to transport urea as well as potential homologues (SEQ ID NOS: 194-223) based on percent identity to the maize orthologues has also been generated for testing in yeast complementation assays as well as for creation of transgenic plants.

### Example 2

### Identification of Potential Urease Genes from Various Plant and Microbial Sources

[0179] Urease is an enzyme that is essential for the breakdown of urea into ammonia which can be utilized by the cell. Through bioinformatic approaches a number of genes encoding potential urease proteins have been identified (SEQ ID NOS: 251-298). Analysis focused primarily on single sub-unit urease proteins which are encoded by only one transcript, and sequences of forty-eight known or putative ureases were obtained from a variety of sources, primarily of fungal or plant origin. Phylogenetic analysis was performed to examine the relationship among the known and putative urease proteins (FIG. 4). While expression of a urease protein alone might be sufficient to enhance urease activity in the plant, it is possible that the co-expression of a urease with its corresponding urease accessory proteins might enhance this enzymatic activity. In bacteria, these proteins are easily identifiable as they fall within the same operon as the urease protein, and they are believed to be involved in proper folding, localization, and metal incorporation into the urease enzyme.

### Example 3

### Identification of Potential GS Genes from Maize and Other Sources

[0180] Once urea has been broken down into its component parts by urease, released ammonia is assimilated into amino acids, primarily through the action of glutamine synthetase enzymes. Through bioinformatic approaches a number of genes encoding potential glutamine synthetase proteins have been previously identified (see, U.S. patent application Ser. No. 12/607,089, published May 6, 2010). Sequences of two known glutamine synthetases, the GS1-3 isoforms from both Zea mays and from Arabidopsis thaliana are included in this application for incorporation into transgenic plants. While these two GS proteins have been used here, this does not exclude the use of either GS1, GS2 or GS3 type glutamine synthetase proteins from plant or other sources to create transgenics with increased ability to utilize urea as an N source.

### Example 4

### Complementation Assays Using a Yeast dur3A Mutant to Test the Urea Transport Ability In Vivo of Potential Urea Transport Proteins

[0181] Genes encoding a number of the previously listed potential DUR3 homologues selected from diverse evolutionary clades (labeled in blue in FIG. 3), as well as the known urea transporters Arabidopsis thaliana DUR3 and Helicobacter pylori UREI, were synthesized into the yeast expression vector pJR1133. The vectors were transformed into a dur3A yeast strain which has a targeted deletion of the gene encoding its high affinity urea transport protein and the transgenes were expressed from the constitutive GPD promoter. The ability of each protein to transport urea was measured by assaying each for its ability to complement the dur3A growth phenotype on minimal media supplemented with 1 mM to 20 mM urea as the sole nitrogen source. The average results of at least two growth complementation assays as well as a qualitative assessment of the function of each protein as a urea transporter are listed in Table 4 below. For qualitative scoring “very good” corresponds to complementation at less than 1 mM urea, “good” corresponds to complementation at 1-3 mM urea, “fair” corresponds to complementation at 3-5 mM urea, “poor” corresponds to complementation at 5-10 mM urea, and “none” corresponds to no complementation evident at concentrations above 10 mM urea.

TABLE 4

| | Score (avg. of 2 | [Urea] Supporting | | Used in |
|---|---|---|---|---|
| Transporter | assays) | Growth | | Bioinformatics? |
| Wild-Type/Vector | Very Good | <1 | mM | No |
| dur3Δ/Vector | None | >10 | mM | No |
| dur3Δ/Arabidopsis DUR3 | Fair | 3-5 | mM | Yes: Functional |
| dur3Δ/Maize DUR3 | Fair | 3-5 | mM | No |
| dur3Δ/Micromonas | Fair | 5 | mM | No |
| DUR3 | | | | |
| dur3Δ/Thalassiosira | Fair | 3-5 | mM | No |
| DUR3 | | | | |
| dur3Δ/Selaginalla DUR3 | Good | 2-3 | mM | Yes: Functional |
| dur3Δ/Synechococcus | Fair | 3-5 | mM | Yes: Functional |
| DUR3 | | | | |
| dur3Δ/Ostreococcus | Fair | 3-5 | mM | No |
| DUR3 | | | | |
| dur3Δ/Bacillus | Fair | 5 | mM | No |
| pseodofirmus DUR3 | | | | |
| dur3Δ/Idiomarina DUR3 | Poor | 7.5 | mM | No |
| dur3Δ/Mycobacterium | Poor/None | >10 | mM | Yes: Non-Functional |
| DUR3 | | | | |
| dur3Δ/Debaryomyces | Fair | 5 | mM | Yes: Functional |
| DUR3 | | | | |
| dur3Δ/Pichia DUR3 | Fair | 3-5 | mM | Yes: Functional |
| dur3Δ/Geobacillus DUR3 | Poor/None | >10 | mM | Yes: Non-Functional |
| dur3Δ/Bacillus | Fair | 5 | mM | No |
| thuringiensis DUR3 | | | | |
| dur3Δ/Chlamydomonas | Fair | 5 | mM | No |
| DUR3 | | | | |
| dur3Δ/Phaeodactylum | Fair | 3-5 | mM | Yes: Functional |
| DUR3 | | | | |
| dur3Δ/Helicobacter UREI | Good | 1-2 | mM | No |
| dur3Δ/Actinobacillus | Poor | >10 | mM | No |
| UREI | | | | |
| dur3Δ/Desulfotomaculum | Fair | 3-4 | mM | No |
| UREI | | | | |
| dur3Δ/Lactobacillus | Good | 1-2 | mM | No |
| UREI | | | | |
| dur3Δ/Oxalobacter UREI | Fair | 4-5 | mM | No |
| dur3Δ/Streptococcus | Good | 5 | mM | No |
| UREI | | | | |

[0182] Transporters included in subsequent bioinformatics analyses as examples of verified urea transporters (verified experimentally or ascertained from literature review) are further assigned the value “Yes: Functional” in the last column, and transporters selected as having little or no ability to transport urea are assigned the value “Yes: Non-Functional”.

[0183] While screening for urea transporters was performed using growth assays of dur3A yeast cells which are defective in urea transport, other methods of screening known in the art could also be utilized. This includes but is not limited to screening for growth on urea as a nitrogen source using other genetically pliable organisms such as bacteria or cultured mammalian cells. Screening for uptake of urea, possibly radioactively labeled, in any of a number of systems including yeast, bacteria, cultured mammalian cells, Xenopus oocytes, membrane vesicle or any equivalent manner.

### Example 5

### Bioinformatics Approach to Define Domains, Motifs, and Residues Critical for the Ability of DUR3 Homologues to Transport Urea Across Cellular Membranes

[0184] Initial screening in yeast identified several Dur3-type proteins with the ability to transport urea into the cell, and sequence analysis of these proteins as well as other previously characterized was performed to residues and domains involved in urea transport. This knowledge was then applied in more stringent database analyses to discover proteins with an improved capacity for urea transport. The MOTIFS program of the Blocks server found on the world wide web at blocks.fhcrc.org was used to create alignments and to identify conserved block regions from various DUR3 homologues either previously demonstrated in the published literature or identified in screening as capable of transporting urea across a biological membrane. Protein sequences of DUR3 homologues from Arabidopsis thaliana, Aspergillus nidulans, Debaromyces hansenii, Oryza sativa-Japonica, Phaeodactylum tricornutum, Pichia angusta, Saccharomyces cerevisiae, Selaginella moellendorffii and Synechococcus sp.WH7805 were used to create alignments and identify conserved blocks (Table 5).

TABLE 5

| | Amino Acid | | |
|---|---|---|---|
| | Positions | | |
| | modeled from | | SEQ |
| | Selaginella | Amino Acid | ID |
| Block | moellendorffii | Sequence | NO: |
| 1 | aa 116-aa167 | PFWYASGATIQVLLFGII | 310 |
| | | AIEIKRKAPSAHTVCEIV | |
| | | RARWGFEAHMVFLSFC | |
| 2 | aa 189-aa240 | LTGVDIYAASFLIPLGVI | 311 |
| | | VYTLAGGLKATFLASYIH | |
| | | SVIVHVVLVIFVYLVY | |
| 3 | aa 279-aa318 | PVSGNYGGSYVTMLSSGG | 312 |
| | | LVFGIINIVGNFGTVFVD | |
| | | NGYW | |
| 4 | aa 374-aa427 | PATATALMGNSGAILLLT | 313 |
| | | MLFMAVTSAGSSELVAVS | |
| | | SLCTYDIYRTYINPKATG | |
| 5 | aa 456-aa498 | RVSLGWMYLAMGVMVGSA | 314 |
| | | VMPIAFLLLWSKANAKGA | |
| | | IAGTIVG | |

[0185] These blocks were modeled on alignment files created using the ClustalW2 multiple sequence alignment program and amino acid residues that were absolutely conserved among all of the sequences initially used to define the blocks were identified. Using these conserved residues as a template, a second in silico screen to identify the subset of amino acid residues which are not conserved in either the Geobacillus kaustophilus or the Mycobacterium smegmatis sequence (both demonstrate little or no ability to transport urea in complementation assay) was performed. The residues absolutely conserved in verified transporters and not conserved in either of two non-functional urea transporters were used to create “urea-critical” motifs which are predicted to have a major positive influence on the ability to transport urea in vivo. An example of this analysis for Blocks 1 and 2 is shown in FIG. 6 with an alignment of the transporters shown in a Clustal W format and the residues used to define the urea critical motif which are conserved in functional transporters and not conserved in at least one non-functional transporter circled. The six urea critical motifs identified are presented in this application (SEQ ID NOS). Urea-critical motifs were used to re-analyse the original list of putative DUR3-type urea transporters presented in FIG. 3, and proteins which were conserved at all of these residues were selected for synthesis and further screening (SEQ ID NOS: 315-321).

[0186] X-ray crystallography demonstrates that the SSF family of proteins shares a remarkably conserved transporter core containing an inverted repeat of 5 transmembrane (TM) helices (FIGS. 7A and 7B). The pseudo 2-fold symmetric relationship of TMs 1-5 and 6-10 enables the transporter to undergo conformation recycling from outward-facing to occluded and finally to inward-facing, a typical rocket-switch or alternative-access mechanism with a single substrate binding site at the center of transporter (FIG. 7C). Another unusual but conserved feature among these transporter structures is that the TM1 helix and its symmetrical counterpart TM6 are unwound or “kinked” in the middle of the transmembrane domain. Consequently, the broken helices provide ample backbone carbonyl and amide groups to facilitate recognition of the incoming substrate through hydrogen bonds. These coiled residues in TM1 and TM6 combined with the middle sections of TM3 and TM8 make up the substrate binding site.

[0187] Among proteins with known 3D structures, the Saccharomyces cerevisiae Dur3 (Sc_Dur3) sequence is best matched to sodium/galactose transporter from Vibrio parahaemolyticus (vSGLT, PDB:2xq2, ref 2) with a marginal sequence identity of ˜22%. To verify this match's significance, PSI-Blast (Position-Specific-Iterative or profile Blast) was employed to search a new data set which contains swiss-prot and SSF transporter sequences with known structures. The Sc_Dur3 and vSGLT alignment in the second round search produces a significant e value of ˜1e-69. TMHMM and other transmembrane helix prediction tools suggest Sc-Dur3 has15 transmembrane helices, more than enough to form the symporter core domain, with extra helices likely forming periphery structure not essential to transport activity but possibly playing a functional role in regulation of the protein. Using the sequence/structure alignment and TM helix prediction, we have identified the 10 core transmembrane helices and the putative urea binding sequence motifs. A 3D membrane imbedded topology of the 10 TM core domain was also constructed by threading Sc-Dur3 sequence through vSGLT structure (FIG. 7). The model reveals that the putative binding site is at the center of protein, suggesting protein motifs of middle sections of TM1, TM3, TM6 and TM8 are important for urea recognition while TM2, TM4, TM5, TM7, TM9 and TM10 likely play in a structural role forming a scaffold to enable confirmation recycling during urea uptake. The approximate location of these transmembrane domains, modeled on the Penicillium Dur3 protein, are defined in Table 6. All fifteen TM helices are defined as well as the ten core transmembrane domains (labeled cTM1-cTM10). Proposed function of each transmembrane domain is also given in the table.

TABLE 6

| Transmembrane | Correlation | | |
|---|---|---|---|
| Domain (Predicted | to Core | Amino Acid | |
| using HMMTOP) | Structure | Residues | Presumed Function |
| TM1 | −1 | aa30-aa49 | Peripheral |
| TM2 | cTM 1 | aa62-aa86 | Central Pore Forming; |
| | | | Probable Urea |
| | | | Binding Site |
| TM3 | cTM 2 | aa95-aa114 | Structural |
| TM4 | cTM 3 | aa139-aa163 | Central Pore Forming; |
| | | | Probable Urea |
| | | | Binding Site |
| TM5 | cTM 4 | aa172-aa191 | Structural |
| TM6 | cTM 5 | aa200-aa219 | Structural |
| TM7 | cTM 6 | aa258-aa275 | Central Pore Forming; |
| | | | Probable Urea |
| | | | Binding Site |
| TM8 | cTM 7 | aa296-aa320 | Structural |
| TM9 | cTM 8 | aa351-aa375 | Central Pore Forming; |
| | | | Probable Urea |
| | | | Binding Site |
| TM10 | cTM 9 | aa400-aa419 | Structural |
| TM11 | cTM 10 | aa428-aa447 | Structural |
| TM12 | +1 | aa454-aa473 | Peripheral |
| TM13 | +2 | aa492-aa515 | Peripheral |
| TM14 | +3 | aa573-aa597 | Peripheral |
| TM15 | +4 | aa606-aa625 | Peripheral |

[0188] The validity of this model is also supported by site mutagenesis on Penicillium chrysogenum Dur3 as shown in FIG. 8 and Table 6. The I180 residue is located in the middle of cTM4 and likely interacts with the plasma membrane. Among verified Dur3-type urea transporters this position is conserved and occupied by hydrophobic residues such as I, L and V (marked by dashed oval in FIG. 8). Mutation of I180 to aspartic acid (D) introduces a hydrophilic charged residue which should drastically disrupt the structural integrity of the transporter. Consistent with this hypothesis the I180->D mutant shows clear defects in its ability to transport urea (Table 7). W72 (marked by dashed oval in FIG. 8) is near the unwound area of cTM1 and is likely involved in urea binding. Mutation of W72 to Alanine (A) results in a moderate inability to take urea into the cell. Both mutated residues fall in or near previously described conserved Blocks 1 and 2 in the N-terminal half of the urea transporter. The first block covers a protein motif between TM2 and TM3. It has been shown that this interhelical motif forms a helix and inserts itself into the central substrate binding cavity from the extracellular side, likely serving as an entrance gate modulating substrate access. The second block mainly consists of TM4 and TM5 (FIG. 8). Based on the 3D model it likely plays a structural role and supports the transporter's conformational flexibility.

TABLE 7

| Mutation Type | Amino Acid Change | Effect on Urea Uptake |
|---|---|---|
| Urea Binding Site | W (72) → A | Moderate |
| Structural | I (180) → D | Severe |

### Example 6

### Testing of Novel Urea Transporters for the Ability to Transport Low Levels of Urea with High Affinity

[0189] As levels of urea in the soil are dramatically decreased by the breakdown of the fertilizer by microbes and soil resident urease proteins, the ability to efficiently compete for low levels of urea will be critical under certain conditions. Six additional novel urea transporters similar to the high affinity DUR3 transporter and having complete conservation of all urea-critical residues identified through bioinformatics have been synthesized and tested for the ability to complement a dur3A yeast mutant. The Oryza DUR3 has been included in this assay as a positive control, as it has previously been demonstrated to rescue yeast as well as Arabidopsis DUR3 deletion mutants. A summary of results from multiple complementation assays are shown below in Table 8, and qualitative scores are similar to those described in Example 4.

TABLE 8

| | | |
|---|---|---|
| | | [Urea] |
| | | Supporting |
| Transporter | Score (avg. of 2 assays) | Growth |

| | | | |
|---|---|---|---|
| Wild-Type/Vector | Very Good | <1 | mM |
| dur3Δ/Vector | None | >10 | mM |
| dur3Δ/Ashbya DUR3 | Very Good | <1 | mM |
| dur3Δ/Lachancea DUR3 | Very Good | <1 | mM |
| dur3Δ/Oryza DUR3 | Fair | 4-5 | mM |
| dur3Δ/Penicillium DUR3 | Very Good | <1 | mM |
| dur3Δ/Physcomitrella DUR3 | Poor/None | >10 | mM |
| dur3Δ/Podospora DUR3 | Very Good | <1 | mM |
| dur3Δ/Tuber DUR3 | Good | 1-2 | mM |

[0190] Several potential urea transporters which tested positive in yeast growth assays for complementation of dur3A phenotype were subsequently screened for the ability to mediate urea uptake at relatively low substrate levels of less than or equal to 500 μM. Yeast growth assays were performed similar to previously described in media supplemented with between 50 μM and 500 μM urea as the sole nitrogen source, and a summary of results with the lowest amount of urea supporting growth among the concentrations tested is shown in Table 9 below.

TABLE 9

| | Minimal [Urea] Concentration Supporting |
|---|---|
| Transporter | Growth |
| dur3Δ/Lachancea DUR3 | 50 μM |
| dur3Δ/Penicillium DUR3 | 50 μM |
| dur3Δ/Podospora DUR3 | 50 μM |
| dur3Δ/Selaginalla DUR3 | 50 μM |
| dur3Δ/Tuber DUR3 | 50 μM |
| dur3Δ/Lactobacillus UREI | 500 μM |

[0191] Uptake assays of [¹⁴C]-urea into dur3A yeast cells expressing one of several urea transporters identified during screening were performed essentially as previously described with slight modifications (Morel, et al., Fungal Genetics and Biology, 2008). As seen in FIG. 9, many of the transporters dramatically increased the amount of labeled urea taken into the cell even at extracellular concentrations as low as 10 μM and at relatively short times of 4 minutes.

### Example 7

### Expression/Phenotype of Arabidopsis and Maize Transgenic Plants

[0192] The model organism Arabidopsis thaliana was used to test the ability of non-native urea transporters to function in plants. Vectors containing various promoters including the endogenous AtDur3 (SEQ ID NO: 303) promoter or the constitutive 35S promoter (SEQ ID NO: 304) driving expression of various urea transporters identified in yeast screening have been created using polynucleotides optimized for expression in Arabidopsis Wild type Arabidopsis (Columbia-0) have been transformed with these expression vectors by an Agrobacterium mediated ‘floral-dip’ method, and several transgenic lines have been identified by selecting the T₀ seeds for herbicide resistance in soil. Molecular characterization of RNA preparations from these transgenic lines has been performed by qPCR to determine expression of each transgene relative to the elF4g control gene and several lines with significant levels of transgene expression have been identified after molecular analysis. Experiments to express the various urea transporters earlier identified are to be performed. Constructs designed for transgene expression from the ZmUBI, ZmRM2 or ZmRCC3 promoter (SEQ ID NOS: 308, 306 and 309) have been produced and transformed into Gaspe germplasm using a previously established Agrobacterium mediated transformation protocol. Transgene expression from Tₒ will be used to select events to be assessed for general growth and reproductive parameters as well as screened for an increased ability to use urea as a nitrogen source.

[0193] To test the effect of transgene expression on Arabidopsis plant performance during growth on urea as a nitrogen source, plants are to be grown in an agarose based sterile soilless system and supplemented with half strength salts as described by Murashige and Skoog, Gambourg's vitamin mix, NiSO₄ to a final concentration of 1 uM and urea at various concentrations between 0.1 μM and 20 μM. T₀ plants which are expressing the transgene have been selected by the presence of the yellow fluorescent protein (YFP), also encoded by the transformation vector, and seedlings not expressing YFP are used as a null control in further experiments. T₁ plants are generated, and these are analyzed at various timepoints post plating on the previously described agarose medium for alteration in growth rates by calculating total leaf area and relative green area of leaves, and transgenic mean parameters are compared to corresponding mean parameters of non-transgenic null controls. After comparison of various growth parameters, plants are harvested and root and shoot total dry weights are determined (after separating the parts and drying at 70° C. for 70 hours). The dried tissue will also be ground and total reduced N is to be measured by the micro-Kjeldahl method. Transgenic mean parameters will be compared to mean parameters of non-transgenic controls.

[0194] To test efficacy of transgene expression on plant performance in maize, urea uptake by the transgenic plants or root sections from these transgenics will be assessed by monitoring uptake of [¹⁴—C]-labeled urea and/or [¹⁵—N]-labeled urea similar to previously describe). For growth assays plants will be grown either hydroponically or in a soilless turface based substrate in modified Hoagland's solution with urea supplemented as the sole source of nitrogen. Root and shoot total dry weights (after separating the parts and drying at 70° C. for 70 hours) of plants grown with urea as a nitrogen source will also be calculated and the dried tissue will be ground and total reduced N is to be measured by the micro-Kjeldahl method as well. Transgenic mean parameters will be compared to mean parameters of non-transgenic controls.

### Example 8

### Transgenic Expression of a Urea Transporter, a Urease and a Glutamine Synthetase Using a Single Three Cassette Vector

[0195] As use of urea by plant cells could be limited by its import into the cell, by its breakdown in the cell, or by the assimilation of its breakdown products into usable forms, stacking of genes involved in any combination of these processes will be used in transgenic plants. Experiments to test the efficacy of co-expression of the various urea transporters along with a urease gene to catabolize urea and a glutamine synthetase to assimilate the liberated ammonia (transgenic stacks) are to be performed. Constructs designed for transporter expression from the root preferred ZmRM2 promoter (SEQ ID NO: 306) with ZmUrease and ZmGS1-3 expressed from the leaf preferred ZmPEPC promoter (SEQ ID NO: 305) have been created and transformed into elite maize germplasm. Constructs for constitutive expression of the various transporters along with AtUrease and AtGS1-3 expressed from the 35S (SEQ ID NO: 304) promoter have also been constructed and transformed into Arabidopsis using an Agrobacterium mediated transformation protocol. While these are specific examples of genetic stacks engineered in plants, any promoter/gene combination of urea transporter/channel with a urease gene and a glutamine synthetase gene could also be used. Table 10 gives a list of a few possible gene/promoter combinations that could also be employed.

TABLE 10

| Transgene | Promoter Type |
|---|---|
| High Affinity Urea | Constitutive (High, Medium, or Low) |
| Transporter | |
| Low Affinity Urea Channel | Green Tissue Specific |
| Urease | Root Preferred (Stele, Cortex, or Nitrate |
| | Inducible) |
| Glutamine Synthetase | Urea Inducible |
| | Nitrate Inducible |
| | Drought inducible |
| | Diurnally regulated |
| | Guard Cell Preferred |
| | Ear Preferred |
| | Stalk Preferred |
| | Seed Specific (Embryo + aleurone, |
| | Endosperm, or Pericarp) |

[0196] For both maize and Arabidopsis, RNA expression analysis of Tₒ events will be used to select events expressing all three transgenes and seeds from these plants are to be assessed for general growth parameters as well as screened for an increased ability to use urea as a nitrogen source. Two of these constructs are also to be tested in elite hybrid corn using field assays for yield. Urea uptake by the transgenic stacks will be assessed by monitoring uptake of [¹⁴—C]-labeled urea and/or [¹⁵—N]-labeled urea. Root and shoot total dry weights (after separating the parts and drying at 70° C. for 70 hours) of plants grown with urea as a nitrogen source will be calculated and the dried tissue will also be ground and total reduced N is to be measured by the micro-Kjeldahl method. Transgenic mean parameters will be compared to mean parameters of non-transgenic controls. Arabidopsis transgenics are also to be assessed for ability to grow on urea as a nitrogen source as described in Example 7. Urease activity of transgenic stacks will be assessed using a modified protocol similar to what has previously been reported by Witte and Medina-Escobar, Analytical Biochemistry, 2001 or an equivalent method. Glutamine synthetase assays are to be performed as previously reported by Kingdon, et al, Biochemistry, 1968 or an equivalent method. In all cases, transgenic mean parameters will be compared to mean parameters of either wild-type plants or non-transgenic null controls.

### Example 9

### Overexpression of Genes Involved in Urea Uptake and Assimilation to Enhance Foliar Uptake of Urea

[0197] Using the previously described maize Gaspe transgenics expressing either a urea transporter alone or a transporter stacked with a urease and glutamine synthetase, plants are to be tested for an increased ability to uptake [¹⁵N]-labeled urea applied to leaves as an aqueous solution. This will be done using a method similar to what has previously described by Below, et al, Agronomy Journal, 1985. After foliar application of the labeled urea, various tissues will be harvested and the uptake and incorporation of N will be examined by determining the concentration of ¹⁵N in each tissue using mass spectrometry. Uptake and incorporation of ¹⁵N by transgenic plants will be assessed relative to null plants coordinately treated with equal amounts of labeled urea. Furthermore, total nitrogen levels as well as levels of nitrate and free amino acids will also be determined as these parameters have previously been demonstrated to increase after foliar application of urea.

### Example 10

### Stacking and Co-Expression of a High Affinity and a Low Affinity Urea Transporter to Increase Urea Uptake Across a Range of Extracellular Urea Concentrations

[0198] In modern agronomic practices, urea fertilizer is often applied to a crop at a limited number of times during a growing cycle. This leads to urea concentrations in the soil that can vary by orders of magnitude depending on when urea was applied and what the prevailing environmental conditions have been in the interim. Co-expression of a high affinity transporter capable of extracting very scarce urea from the soil and a low affinity channel which could increase uptake of urea when it is available in excess should increase uptake over a wider range of concentrations allowing efficient uptake of urea by transgenics regardless of the concentration of the substrate in the soil. Examples of newly identified proteins similar to both the known Dur3-type high affinity urea transporters as well as the lower affinity Urel-type urea channels have been presented previously in this patent. Experiments to test the efficacy of co-expression of multiple urea transporters from both the Dur3 family of high affinity urea transporters as well as from the Urel family of urea channel proteins are in progress, however similar co-expression stacks could be employed with any combination of transporters with differing Kₘ and Vₘₐₓ values. Constructs designed for co-expression of two urea transporters from both a constitutive and a root preferred promoter have been designed and created (Table 11). These constructs are to be transformed into both Arabidopsis and maize Gaspe germplasm using a previously established Agrobacterium mediated transformation protocol. Positive transgene events will be assessed for general growth and reproductive parameters as well as screened for an increased ability to use urea as a nitrogen source. Transgenic plants will be assessed for the potential of enhanced urea uptake at both low and high levels of extracellular urea, and significant events would be expected to increase uptake and N status of the cell over a wide range of urea in the growth medium as illustrated in FIG. 10.

TABLE 11

| High Affinity | | Low Affinity | | |
|---|---|---|---|---|
| Transporter | Promoter | Channel | Promoter | Plant Host |
| Selaginella DUR3 | 35S (Constitutive) | Helicobacter UREI | 35S (Constitutive) | Arabidopsis |
| Selaginella DUR3 | 35S (Constitutive) | Lactobacillus UREI | 35S (Constitutive) | Arabidopsis |
| Lachancea DUR3 | 35S (Constitutive) | Helicobacter UREI | 35S (Constitutive) | Arabidopsis |
| Lachancea DUR3 | 35S (Constitutive) | Lactobacillus UREI | 35S (Constitutive) | Arabidopsis |
| Penicillium DUR3 | 35S (Constitutive) | Helicobacter UREI | 35S (Constitutive) | Arabidopsis |
| Penicillium DUR3 | 35S (Constitutive) | Lactobacillus UREI | 35S (Constitutive) | Arabidopsis |
| Podospora DUR3 | 35S (Constitutive) | Helicobacter UREI | 35S (Constitutive) | Arabidopsis |
| Podospora DUR3 | 35S (Constitutive) | Lactobacillus UREI | 35S (Constitutive) | Arabidopsis |
| Tuber DUR3 | 35S (Constitutive) | Helicobacter UREI | 35S (Constitutive) | Arabidopsis |
| Tuber DUR3 | 35S (Constitutive) | Lactobacillus UREI | 35S (Constitutive) | Arabidopsis |

### Example 11

### Transformation and Regeneration of Transgenic Plants by Agrobacterium-Mediated Transformation

[0199] For Agrobacterium-mediated transformation of maize with a sense sequence of the urea transporter, urease or glutamine synthetase sequence of the present invention, preferably the method of Zhao is employed (U.S. Pat. No. 5,981,840 and PCT Patent Publication WO 1998/32326, the contents of which are hereby incorporated by reference). Briefly, immature embryos are isolated from maize and the embryos contacted with a suspension of Agrobacterium, where the bacteria are capable of transferring the sense urea transporter, urease, or glutamine synthetase sequences to at least one cell of at least one of the immature embryos (step 1: the infection step). In this step the immature embryos are preferably immersed in an Agrobacterium suspension for the initiation of inoculation. The embryos are co-cultured for a time with the Agrobacterium (step 2: the co-cultivation step). Preferably the immature embryos are cultured on solid medium following the infection step. Following this co-cultivation period an optional “resting” step is contemplated. In this resting step, the embryos are incubated in the presence of at least one antibiotic known to inhibit the growth of Agrobacterium without the addition of a selective agent for plant transformants (step 3: resting step). Preferably the immature embryos are cultured on solid medium with antibiotic, but without a selecting agent, for elimination of Agrobacterium and for a resting phase for the infected cells. Next, inoculated embryos are cultured on medium containing a selective agent and growing transformed callus is recovered (step 4: the selection step). Preferably, the immature embryos are cultured on solid medium with a selective agent resulting in the selective growth of transformed cells. The callus is then regenerated into plants (step 5: the regeneration step) and preferably calli grown on selective medium are cultured on solid medium to regenerate the plants. Plants are monitored and scored for a modulation in tissue development.

[0200] Immature maize embryos from greenhouse donor plants are bombarded with a plasmid containing the urea transporter, urease, or glutamine synthetase sequence operably linked to constitutive or tissue specific promoter (Vilardell, et al., (1990) Plant Mol Biol 14:423-432) and the selectable marker gene PAT, which confers resistance to the herbicide Bialaphos. Alternatively, the selectable marker gene is provided on a separate plasmid. Transformation is performed as follows. Media recipes follow below.

[0201] Preparation of Target Tissue:

[0202] The ears are husked and surface sterilized in 30% Clorox® bleach plus 0.5% Micro detergent for 20 minutes, and rinsed two times with sterile water. The immature embryos are excised and placed embryo axis side down (scutellum side up), 25 embryos per plate, on 560Y medium for 4 hours and then aligned within the 2.5-cm target zone in preparation for bombardment.

[0203] Preparation of DNA:

[0204] A plasmid vector comprising the urea transporter, urease, or glutamine synthetase sequence operably linked to an ubiquitin promoter is made. This plasmid DNA plus plasmid DNA containing a PAT selectable marker is precipitated onto 1.1 μm (average diameter) tungsten pellets using a CaCl₂ precipitation procedure as follows:

[0205] 100 μl prepared tungsten particles in water

[0206] 10 μl (1 μg) DNA in Tris EDTA buffer (1 pg total DNA)

[0207] 100 μl 2.5 M CaCl₂

[0208] 10 μl 0.1M spermidine

[0209] Each reagent is added sequentially to the tungsten particle suspension, while maintained on the multitube vortexer. The final mixture is sonicated briefly and allowed to incubate under constant vortexing for 10 minutes. After the precipitation period, the tubes are centrifuged briefly, liquid removed, washed with 500 ml 100% ethanol and centrifuged for 30 seconds. Again the liquid is removed, and 105 μl 100% ethanol is added to the final tungsten particle pellet. For particle gun bombardment, the tungsten/DNA particles are briefly sonicated and 10 μl spotted onto the center of each macrocarrier and allowed to dry about 2 minutes before bombardment.

[0210] Particle Gun Treatment:

[0211] The sample plates are bombarded at level #4 in particle gun #HE34-1 or #HE34-2. All samples receive a single shot at 650 PSI, with a total of ten aliquots taken from each tube of prepared particles/DNA.

[0212] Subsequent Treatment:

[0213] Following bombardment, the embryos are kept on 560Y medium for 2 days, then transferred to 560R selection medium containing 3 mg/liter Bialaphos and subcultured every 2 weeks. After approximately 10 weeks of selection, selection-resistant callus clones are transferred to 288J medium to initiate plant regeneration. Following somatic embryo maturation (2-4 weeks), well-developed somatic embryos are transferred to medium for germination and transferred to the lighted culture room. Approximately 7-10 days later, developing plantlets are transferred to 272V hormone-free medium in tubes for 7-10 days until plantlets are well established. Plants are then transferred to inserts in flats (equivalent to 2.5″ pot) containing potting soil and grown for 1 week in a growth chamber, subsequently grown an additional 1-2 weeks in the greenhouse, then transferred to classic 600 pots (1.6 gallon) and grown to maturity. Plants are monitored and scored for increased drought tolerance. Assays to measure improved drought tolerance are routine in the art and include, for example, increased kernel-earring capacity yields under drought conditions when compared to control maize plants under identical environmental conditions. Alternatively, the transformed plants can be monitored for a modulation in meristem development (i.e., a decrease in spikelet formation on the ear). See, for example, Bruce, et al., (2002) Journal of Experimental Botany 53:1-13.

[0214] Bombardment and Culture Media:

[0215] Bombardment medium (560Y) comprises 4.0 g/l N6 basal salts (SIGMA C-1416), 1.0 ml/l Eriksson's Vitamin Mix (1000×SIGMA-1511), 0.5 mg/l thiamine HCl, 120.0 g/l sucrose, 1.0 mg/l 2,4-D and 2.88 g/l L-proline (brought to volume with D-I H₂O following adjustment to pH 5.8 with KOH); 2.0 g/l Gelrite® (added after bringing to volume with D-I H₂O); and 8.5 mg/l silver nitrate (added after sterilizing the medium and cooling to room temperature). Selection medium (560R) comprises 4.0 g/l N6 basal salts (SIGMA C-1416), 1.0 ml/I Eriksson's Vitamin Mix (1000×SIGMA-1511), 0.5 mg/l thiamine HCl, 30.0 g/l sucrose, and 2.0 mg/l 2,4-D (brought to volume with D-I H₂O following adjustment to pH 5.8 with KOH); 3.0 g/l Gelrite® (added after bringing to volume with D-I H₂O) and 0.85 mg/l silver nitrate and 3.0 mg/l bialaphos (both added after sterilizing the medium and cooling to room temperature).

[0216] Plant regeneration medium (288J) comprises 4.3 g/l MS salts (GIBCO 11117-074), 5.0 ml/I MS vitamins stock solution (0.100 g nicotinic acid, 0.02 g/l thiamine HCL, 0.10 g/l pyridoxine HCL and 0.40 g/l glycine brought to volume with polished D-I H₂O) (Murashige and Skoog, (1962) Physiol. Plant. 15:473), 100 mg/l myo-inositol, 0.5 mg/l zeatin, 60 g/l sucrose and 1.0 ml/I of 0.1 mM abscisic acid (brought to volume with polished D-I H₂O after adjusting to pH 5.6); 3.0 g/l Gelrite® (added after bringing to volume with D-I H₂O) and 1.0 mg/l indoleacetic acid and 3.0 mg/l bialaphos (added after sterilizing the medium and cooling to 60° C.). Hormone-free medium (272V) comprises 4.3 g/l MS salts (GIBCO 11117-074), 5.0 ml/I MS vitamins stock solution (0.100 g/l nicotinic acid, 0.02 g/l thiamine HCL, 0.10 g/l pyridoxine HCL, and 0.40 g/l glycine brought to volume with polished D-I H₂O), 0.1 g/l myo-inositol and 40.0 g/l sucrose (brought to volume with polished D-I H₂O after adjusting pH to 5.6) and 6 g/l Bacto™-agar (added after bringing to volume with polished D-I H₂O), sterilized and cooled to 60° C.

### Example 12

### Soybean Embryo Transformation

[0217] Soybean embryos are bombarded with a plasmid containing a sense urea transporter, urease, or glutamine synthetase sequences operably linked to an ubiquitin promoter as follows. To induce somatic embryos, cotyledons, 3-5 mm in length dissected from surface-sterilized, immature seeds of the soybean cultivar A2872, are cultured in the light or dark at 26° C. on an appropriate agar medium for six to ten weeks. Somatic embryos producing secondary embryos are then excised and placed into a suitable liquid medium. After repeated selection for clusters of somatic embryos that multiplied as early, globular-staged embryos, the suspensions are maintained as described below.

[0218] Soybean embryogenic suspension cultures can be maintained in 35 ml liquid media on a rotary shaker, 150 rpm, at 26° C. with florescent lights on a 16:8 hour day/night schedule. Cultures are subcultured every two weeks by inoculating approximately 35 mg of tissue into 35 ml of liquid medium.

[0219] Soybean embryogenic suspension cultures may then be transformed by the method of particle gun bombardment (Klein, et al., (1987) Nature (London) 327:70-73, U.S. Pat. No. 4,945,050). A Du Pont Biolistic PDS1000/HE instrument (helium retrofit) can be used for these transformations.

[0220] A selectable marker gene that can be used to facilitate soybean transformation is a transgene composed of the 35S promoter from Cauliflower Mosaic Virus (Odell, et al., (1985) Nature 313:810-812), the hygromycin phosphotransferase gene from plasmid pJR225 (from E. coli; Gritz, et al., (1983) Gene 25:179-188) and the 3′ region of the nopaline synthase gene from the T-DNA of the Ti plasmid of Agrobacterium tumefaciens. The expression cassette comprising a sense urea transporter, urease, or glutamine synthetase sequence operably linked to the ubiquitin promoter can be isolated as a restriction fragment. This fragment can then be inserted into a unique restriction site of the vector carrying the marker gene.

[0221] To 50 μl of a 60 mg/ml 1 μm gold particle suspension is added (in order): 5 μl DNA (1 μg/μl), 20 μl spermidine (0.1M), and 50 μl CaCl₂ (2.5 M). The particle preparation is then agitated for three minutes, spun in a microfuge for 10 seconds and the supernatant removed. The DNA-coated particles are then washed once in 400 μl 70% ethanol and resuspended in 40 μl of anhydrous ethanol. The DNA/particle suspension can be sonicated three times for one second each. Five microliters of the DNA-coated gold particles are then loaded on each macro carrier disk.

[0222] Approximately 300-400 mg of a two-week-old suspension culture is placed in an empty 60×15 mm petri dish and the residual liquid removed from the tissue with a pipette. For each transformation experiment, approximately 5-10 plates of tissue are normally bombarded. Membrane rupture pressure is set at 1100 psi, and the chamber is evacuated to a vacuum of 28 inches mercury. The tissue is placed approximately 3.5 inches away from the retaining screen and bombarded three times. Following bombardment, the tissue can be divided in half and placed back into liquid and cultured as described above.

[0223] Five to seven days post bombardment, the liquid media may be exchanged with fresh media and eleven to twelve days post-bombardment with fresh media containing 50 mg/ml hygromycin. This selective media can be refreshed weekly. Seven to eight weeks post-bombardment, green, transformed tissue may be observed growing from untransformed, necrotic embryogenic clusters. Isolated green tissue is removed and inoculated into individual flasks to generate new, clonally propagated, transformed embryogenic suspension cultures. Each new line may be treated as an independent transformation event. These suspensions can then be subcultured and maintained as clusters of immature embryos or regenerated into whole plants by maturation and germination of individual somatic embryos.

### Example 13

### Sunflower Meristem Tissue Transformation

[0224] Sunflower meristem tissues are transformed with an expression cassette containing a sense urea transporter, urease or glutamine synthetase sequence operably linked to a ubiquitin promoter as follows (see also, EP Patent Number 0 486233, herein incorporated by reference and Malone-Schoneberg, et al., (1994) Plant Science 103:199-207). Mature sunflower seed (Helianthus annuus L.) are dehulled using a single wheat-head thresher. Seeds are surface sterilized for 30 minutes in a 20% Clorox® bleach solution with the addition of two drops of Tween® 20 per 50 ml of solution. The seeds are rinsed twice with sterile distilled water.

[0225] Split embryonic axis explants are prepared by a modification of procedures described by Schrammeijer, et al., (Schrammeijer, et al., (1990) Plant Cell Rep. 9:55-60). Seeds are imbibed in distilled water for 60 minutes following the surface sterilization procedure. The cotyledons of each seed are then broken off, producing a clean fracture at the plane of the embryonic axis. Following excision of the root tip, the explants are bisected longitudinally between the primordial leaves. The two halves are placed, cut surface up, on GBA medium consisting of Murashige and Skoog mineral elements (Murashige, et al., (1962) Physiol. Plant., 15:473-497), Shepard's vitamin additions (Shepard, (1980) in Emergent Techniques for the Genetic Improvement of Crops (University of Minnesota Press, St. Paul, Minn.), 40 mg/l adenine sulfate, 30 WI sucrose, 0.5 mg/l 6-benzyl-aminopurine (BAP), 0.25 mg/l indole-3-acetic acid (IAA), 0.1 mg/l gibberellic acid (GA₃), pH 5.6 and 8 WI Phytagar.

[0226] The explants are subjected to microprojectile bombardment prior to Agrobacterium treatment (Bidney, et al., (1992) Plant Mol. Biol. 18:301-313). Thirty to forty explants are placed in a circle at the center of a 60×20 mm plate for this treatment. Approximately 4.7 mg of 1.8 mm tungsten microprojectiles are resuspended in 25 ml of sterile TE buffer (10 mM Tris HCl, 1 mM EDTA, pH 8.0) and 1.5 ml aliquots are used per bombardment. Each plate is bombarded twice through a 150 mm nytex screen placed 2 cm above the samples in a PDS 1000® particle acceleration device.

[0227] Disarmed Agrobacterium tumefaciens strain EHA105 is used in all transformation experiments. A binary plasmid vector comprising the expression cassette that contains the urea transporter, urease, or glutamine synthetase gene operably linked to the ubiquitin promoter is introduced into Agrobacterium strain EHA105 via freeze-thawing as described by Holsters, et al., (1978) Mol. Gen. Genet. 163:181-187. This plasmid further comprises a kanamycin selectable marker gene (i.e, nptII). Bacteria for plant transformation experiments are grown overnight (28° C. and 100 RPM continuous agitation) in liquid YEP medium (10 gm/l yeast extract, 10 gm/l Bacto® peptone and 5 gm/l NaCl, pH 7.0) with the appropriate antibiotics required for bacterial strain and binary plasmid maintenance. The suspension is used when it reaches an OD₆₀₀ of about 0.4 to 0.8. The Agrobacterium cells are pelleted and resuspended at a final OD₆₀₀ of 0.5 in an inoculation medium comprised of 12.5 mM MES pH 5.7, 1 gm/l NH₄Cl and 0.3 gm/l MgSO₄.

[0228] Freshly bombarded explants are placed in an Agrobacterium suspension, mixed, and left undisturbed for 30 minutes. The explants are then transferred to GBA medium and co-cultivated, cut surface down, at 26° C. and 18-hour days. After three days of co-cultivation, the explants are transferred to 374B (GBA medium lacking growth regulators and a reduced sucrose level of 1%) supplemented with 250 mg/l cefotaxime and 50 mg/l kanamycin sulfate. The explants are cultured for two to five weeks on selection and then transferred to fresh 374B medium lacking kanamycin for one to two weeks of continued development. Explants with differentiating, antibiotic-resistant areas of growth that have not produced shoots suitable for excision are transferred to GBA medium containing 250 mg/l cefotaxime for a second 3-day phytohormone treatment. Leaf samples from green, kanamycin-resistant shoots are assayed for the presence of NPTII by ELISA and for the presence of transgene expression by assaying for a modulation in meristem development (i.e., an alteration of size and appearance of shoot and floral meristems).

[0229] NPTII-positive shoots are grafted to Pioneer® hybrid 6440 in vitro-grown sunflower seedling rootstock. Surface sterilized seeds are germinated in 48-0 medium (half-strength Murashige and Skoog salts, 0.5% sucrose, 0.3% Gelrite®, pH 5.6) and grown under conditions described for explant culture. The upper portion of the seedling is removed, a 1 cm vertical slice is made in the hypocotyl, and the transformed shoot inserted into the cut. The entire area is wrapped with Parafilm® to secure the shoot. Grafted plants can be transferred to soil following one week of in vitro culture. Grafts in soil are maintained under high humidity conditions followed by a slow acclimatization to the greenhouse environment. Transformed sectors of TO plants (parental generation) maturing in the greenhouse are identified by NPTII ELISA and/or by urea transporter, urease, or glutamine synthetase activity analysis of leaf extracts while transgenic seeds harvested from NPTII-positive TO plants are identified by urea transporter, urease, or glutamine synthetase activity analysis of small portions of dry seed cotyledon.

[0230] An alternative sunflower transformation protocol allows the recovery of transgenic progeny without the use of chemical selection pressure. Seeds are dehulled and surface-sterilized for 20 minutes in a 20% Clorox® bleach solution with the addition of two to three drops of Tween® 20 per 100 ml of solution, then rinsed three times with distilled water. Sterilized seeds are imbibed in the dark at 26° C. for 20 hours on filter paper moistened with water. The cotyledons and root radical are removed, and the meristem explants are cultured on 374E (GBA medium consisting of MS salts, Shepard vitamins, 40 mg/l adenine sulfate, 3% sucrose, 0.5 mg/l 6-BAP, 0.25 mg/l IAA, 0.1 mg/l GA and 0.8% Phytagar at pH 5.6) for 24 hours under the dark. The primary leaves are removed to expose the apical meristem, around 40 explants are placed with the apical dome facing upward in a 2 cm circle in the center of 374M (GBA medium with 1.2% Phytagar) and then cultured on the medium for 24 hours in the dark.

[0231] Approximately 18.8 mg of 1.8 μm tungsten particles are resuspended in 150 μl absolute ethanol. After sonication, 8 μl of it is dropped on the center of the surface of macrocarrier. Each plate is bombarded twice with 650 psi rupture discs in the first shelf at 26 mm of Hg helium gun vacuum.

[0232] The plasmid of interest is introduced into Agrobacterium tumefaciens strain EHA105 via freeze thawing as described previously. The pellet of overnight-grown bacteria at 28° C. in a liquid YEP medium (10 g/l yeast extract, 10 g/l Bacto® peptone and 5 g/l NaCl, pH 7.0) in the presence of 50 μg/l kanamycin is resuspended in an inoculation medium (12.5 mM 2-mM 2-(N-morpholino) ethanesulfonic acid, MES, 1 g/l NH₄Cl and 0.3 g/l MgSO₄ at pH 5.7) to reach a final concentration of 4.0 at OD₆₀₀. Particle-bombarded explants are transferred to GBA medium (374E) and a droplet of bacteria suspension is placed directly onto the top of the meristem. The explants are co-cultivated on the medium for 4 days, after which the explants are transferred to 374C medium (GBA with 1% sucrose and no BAP, IAA, GA3 and supplemented with 250 μg/ml cefotaxime). The plantlets are cultured on the medium for about two weeks under 16-hour day and 26° C. incubation conditions.

[0233] Explants (around 2 cm long) from two weeks of culture in 374C medium are screened for a modulation in meristem development (i.e., an alteration of size and appearance of shoot and floral meristems). After positive (i.e., an increase in urea transporter, urease or glutamine synthetase expression) explants are identified, those shoots that fail to exhibit an increase in urea transport, urea breakdown or ammonia assimilation activity are discarded and every positive explant is subdivided into nodal explants. One nodal explant contains at least one potential node. The nodal segments are cultured on GBA medium for three to four days to promote the formation of auxiliary buds from each node. Then they are transferred to 374C medium and allowed to develop for an additional four weeks. Developing buds are separated and cultured for an additional four weeks on 374C medium. Pooled leaf samples from each newly recovered shoot are screened again by the appropriate protein activity assay. At this time, the positive shoots recovered from a single node will generally have been enriched in the transgenic sector detected in the initial assay prior to nodal culture.

[0234] Recovered shoots positive for an increased urea transporter, urease, or glutamine synthetase expression are grafted to Pioneer hybrid 6440 in vitro-grown sunflower seedling rootstock. The rootstocks are prepared in the following manner. Seeds are dehulled and surface-sterilized for 20 minutes in a 20% Clorox® bleach solution with the addition of two to three drops of Tween® 20 per 100 ml of solution and are rinsed three times with distilled water. The sterilized seeds are germinated on the filter moistened with water for three days, then they are transferred into 48 medium (half-strength MS salt, 0.5% sucrose, 0.3% Gelrite® pH 5.0) and grown at 26° C. under the dark for three days, then incubated at 16-hour-day culture conditions. The upper portion of selected seedling is removed, a vertical slice is made in each hypocotyl, and a transformed shoot is inserted into a V-cut. The cut area is wrapped with Parafilm®. After one week of culture on the medium, grafted plants are transferred to soil. In the first two weeks, they are maintained under high humidity conditions to acclimatize to a greenhouse environment.

### Example 14

### Variants of Urea Transporter, Urease, or Glutamine Synthetase Sequences

[0235] A. Variant Nucleotide Sequences of Urea Transporter, Urease or Glutamine

[0236] Synthetase that do not aLter the Encoded Amino Acid Sequence

[0237] The urea transporter, urease, or glutamine synthetase nucleotide sequences are used to generate variant nucleotide sequences having the nucleotide sequence of the open reading frame with about 70%, 75%, 80%, 85%, 90% and 95% nucleotide sequence identity when compared to the starting unaltered ORF nucleotide sequence of the corresponding SEQ ID NO. These functional variants are generated using a standard codon table. While the nucleotide sequence of the variants are altered, the amino acid sequence encoded by the open reading frames do not change.

[0238] B. Variant Amino Acid Sequences of Urea Transporter, Urease or Glutamine Synthetase Polypeptides

[0239] Variant amino acid sequences of the urea transporter, urease, or glutamine synthetase polypeptides are generated. In this example, one amino acid is altered. Specifically, the open reading frames are reviewed to determine the appropriate amino acid alteration. The selection of the amino acid to change is made by consulting the protein alignment (with the other orthologs and other gene family members from various species). An amino acid is selected that is deemed not to be under high selection pressure (not highly conserved) and which is rather easily substituted by an amino acid with similar chemical characteristics (i.e., similar functional side-chain). Using the protein alignment set forth in FIG. 6 or 8, an appropriate amino acid can be changed. Once the targeted amino acid is identified, the procedure outlined in the following section C is followed. Variants having about 70%, 75%, 80%, 85%, 90% and 95% nucleic acid sequence identity are generated using this method.

[0240] C. Additional Variant Amino Acid Sequences of Urea Transporter, Urease or Glutamine Synthetase Polypeptides

[0241] In this example, artificial protein sequences are created having 80%, 85%, 90% and 95% identity relative to the reference protein sequence. This latter effort requires identifying conserved and variable regions from the alignment set forth in FIG. 6 or 8 and then the judicious application of an amino acid substitutions table. These parts will be discussed in more detail below.

[0242] Largely, the determination of which amino acid sequences are altered is made based on the conserved regions among urea transporter, urease or glutamine synthetase protein or among the other urea transporter, urease, or glutamine synthetase polypeptides. Based on the sequence alignment, the various regions of the urea transporter, urease, or glutamine synthetase polypeptide that can likely be altered are represented in lower case letters, while the conserved regions are represented by capital letters. It is recognized that conservative substitutions can be made in the conserved regions below without altering function. In addition, one of skill will understand that functional variants of the urea transporter, urease, or glutamine synthetase sequence of the invention can have minor non-conserved amino acid alterations in the conserved domain.

[0243] Artificial protein sequences are then created that are different from the original in the intervals of 80-85%, 85-90%, 90-95% and 95-100% identity. Midpoints of these intervals are targeted, with liberal latitude of plus or minus 1%, for example. The amino acids substitutions will be effected by a custom Perl script. The substitution table is provided below in Table 12.

TABLE 12
Substitution Table

| | Strongly | | |
|---|---|---|---|
| | Similar and | Rank of | |
| | Optimal | Order to | |
| Amino Acid | Substitution | Change | Comment |
| I | L, V | 1 | 50:50 substitution |
| L | I, V | 2 | 50:50 substitution |
| V | I, L | 3 | 50:50 substitution |
| A | G | 4 | |
| G | A | 5 | |
| D | E | 6 | |
| E | D | 7 | |
| W | Y | 8 | |
| Y | W | 9 | |
| S | T | 10 | |
| T | S | 11 | |
| K | R | 12 | |
| R | K | 13 | |
| N | Q | 14 | |
| Q | N | 15 | |
| F | Y | 16 | |
| M | L | 17 | First methionine cannot change |
| H | | Na | No good substitutes |
| C | | Na | No good substitutes |
| P | | Na | No good substitutes |

[0244] First, any conserved amino acids in the protein that should not be changed is identified and “marked off” for insulation from the substitution. The start methionine will of course be added to this list automatically. Next, the changes are made.

[0245] H, C and P are not changed in any circumstance. The changes will occur with isoleucine first, sweeping N-terminal to C-terminal. Then leucine, and so on down the list until the desired target it reached. Interim number substitutions can be made so as not to cause reversal of changes. The list is ordered 1-17, so start with as many isoleucine changes as needed before leucine, and so on down to methionine. Clearly many amino acids will in this manner not need to be changed. L, I and V will involve a 50:50 substitution of the two alternate optimal substitutions.

[0246] The variant amino acid sequences are written as output. Perl script is used to calculate the percent identities. Using this procedure, variants of the Dur3 and Urel polypeptides are generating having about 80%, 85%, 90% and 95% amino acid identity to the starting unaltered ORF nucleotide sequence.

[0247] All publications and patent applications in this specification are indicative of the level of ordinary skill in the art to which this invention pertains. All publications and patent applications are herein incorporated by reference to the same extent as if each individual publication or patent application was specifically and individually indicated by reference.

[0248] The invention has been described with reference to various specific and preferred embodiments and techniques. However, it should be understood that many variations and modifications may be made while remaining within the spirit and scope of the invention.

What is claimed is:

1. An isolated polynucleotide that modulates urea assimilation selected from the group consisting of:
a. a polynucleotide encoding a polypeptide having at least 80% sequence identity, as determined by the GAP algorithm under default parameters, to the full length sequence of a polypeptide selected from the group consisting of SEQ ID NOS: 224-250, 300, 302 and 321, wherein the polypeptide functions as a modifier of urea uptake;
b. a polynucleotide that is at least 80% identical as determined by the GAP algorithm to a polynucleotide sequence selected from the group consisting of SEQ ID NO: 224-250, 300, 302 and 321;
c. a polynucleotide selected from the group consisting of SEQ ID NOS: 224-250, 300, 302 and 321; and
d. a polynucleotide which is complementary to the polynucleotide of (a), (b) or (c).

2. A recombinant expression cassette, comprising the polynucleotide of claim 1, wherein the polynucleotide is operably linked, in sense orientation, to a promoter.

3. A host cell comprising the expression cassette of claim 2.

4. A transgenic plant comprising the recombinant expression cassette of claim 2.

5. The transgenic plant of claim 4, wherein said plant is a monocot.

6. The transgenic plant of claim 4, wherein said plant is a dicot.

7. The transgenic plant of claim 4, wherein said plant is selected from the group consisting of: maize, soybean, sunflower, sorghum, canola, wheat, alfalfa, cotton, rice, barley, millets, peanut, switchgrass, myscanthus, triticale and cocoa.

8. A transgenic seed from the transgenic plant of claim 4.

9. A method of modulating the urea transporter, urease or glutamine synthetase either alone or in combination in a plant, the method comprising:
a. introducing into a plant cell a recombinant expression cassette comprising the polynucleotide of claim 1 operably linked to a promoter;
b. culturing the plant cell under plant cell growing conditions; and
c. regenerating a plant form said plant cell; wherein the urea transporter, urease, or glutamine synthetase in said plant is modulated.

10. The method of claim 9, wherein the plant is selected from the group consisting of: maize, soybean, alfalfa, barley, canola, cocoa, cotton, millets, myscanthus, peanut, rice, rye, sorghum, sugar cane, switchgrass, triticale and wheat.

11. A method of increasing the urea assimilation activity in a plant cell, comprising:
a. providing a nucleotide sequence encoding a urea transporter having at least 90% sequence identity to SEQ ID NO: 1-223, 251-299, 301 and 322;
b. linking the nucleotide to one or more nucleotide sequences selected from the group consisting of: an additional urea transporter, a urease and a glutamine synthase; and
c. introducing the nucleotide sequence of step (a) and the optionally linked sequences of (b) into the plant cell, wherein urea assimilation in the plant cell is increased.

12. The method of claim 9, wherein said plant cell is from a monocot.

13. The method of claim 12, wherein said monocot is maize, soybean, alfalfa, barley, canola, cocoa, cotton, millets, myscanthus, peanut, rice, rye, sorghum, sugar cane, switchgrass, triticale or wheat

14. The method of claim 9, wherein said plant cell is from a dicot.

15. The transgenic plant of claim 4, wherein the urea transport, urea breakdown, or ammonia assimilation activity in said plant is increased.

16. The transgenic plant of claim 15, wherein the plant has increased seedling vigor.

17. The transgenic plant of claim 15, wherein the plant has enhanced silk emergence.

18. The transgenic plant of claim 15, wherein the plant has enhanced nitrogen assimilation in roots.

19. The transgenic plant of claim 15, wherein the plant has increased seed number per plant.

20. The transgenic plant of claim 15, wherein the plant has increased seed size and mass.

21. The transgenic plant of claim 15, wherein the plant has seed with increased embryo size.

22. The transgenic plant of claim 15, wherein the plant has increased nitrogen assimilation in the leaf.

23. The transgenic plant of claim 15, wherein the plant has increased ear size.

24. The transgenic plant of claim 15, wherein the plant has enhanced nitrogen utilization efficiency.

25. The transgenic plant of claim 15, wherein the plant has increased nitrogen remobilization during senescence.

26. The transgenic plant of claim 15, wherein the plant has increased nitrogen remobilization during grain development.

27. A method of modifying urea uptake comprising:
a. transforming a corn plant with a high affinity urea transporter and a low affinity urea transporter; and
b. expressing the low affinity and high affinity urea transporters whereby urea uptake the transgenic plant is improved as compared to a control plant.

28. The method of claim 27, wherein the low affinity and the high affinity urea transporters are active at different growth stages of the corn.

29. The method of claim 27, wherein the low affinity and the high affinity urea transporters are active depending on the available urea concentrations in the soil.

30. The method of claim 27 wherein the transporters are Dur3 or Urel family members

31. The method of claim 27 wherein the plant is transformed with an expression cassette comprising a promoter selected from the group comprising a urea regulated promoter, a constitutive or a root preferred promoter.

32. A method of increasing yield by applying a nitrogen source to a plant at or during the reproductive stage, the method comprising:
(a) growing the plant to a reproductive stage; and
(b) providing a foliar application of urea to the plant, wherein the plant is capable of utilizing the foliar application of urea through the expression of one or more urea transporters in the leaf, whereby the yield of the plant is increased.

33. A method of reducing nitrogen loss from an agricultural production environment, the method comprising:
(a) growing a plant that is capable of utilizing urea as a direct nitrogen source from the soil or through a foliar application;
(b) providing an urea containing nutrient source to the plant;
(c) growing the plant and thereby reducing the loss of nitrogen from the agricultural production environment.

34. The method of claim 33, wherein the plant expresses an urea transporter.

35. The method of claim 34, wherein the urea transporter is a high affinity transporter.

36. The method of claim 33, wherein the loss of nitrogen is reduced through an increased uptake of urea by the plant.

The application's sequence listing, which the Patent Office published only in electronic form, follows.

SEQUENCE LISTING (322 sequences)

SEQ ID NO: 1 - protein, 735 aa, Saccharomyces_cerevisiae
MGEFKPPLPQGAGYAIVLGLGAVFAGMMVLTTYLLKRYQKEIITAEEFTTAGRSVKTGLVAAAVVSSWIWCSTLLTSSTKEYADGIFGGYAYAAGACFQIIAFAILAIKTKQMAPNAHTYLELVRTRYGKIGHGCYLFYAIATNILVTSMLLTSGSAVFSDLTGMNTIASCFLLPVGVVVYTLFGGIKATFLTDYMHTCVIIIIVLVFAFKVYATSDVLGSPGKVYDLVREAAKRHPVDGNYQGEYMTMTSKSAGILLIINLIGNFGTVFLDNGYWNKAISASPAASLKAYAIGGLAWFAVPSLISLTMGLACLAVETSPNFPTYPDPLTSFQANSGLVLPAAAIAIMGKGGAVASLLMIFMAVTSAMSAELIAVSSVFTYDIYREYIDPRASGKKLIYTSHVACIFFGLAMSGFSVGLYYGGISMGYIYEMMGIIISSAVLPVVLTLCSKDMNLVAAVVSPILGTGLAIMSWLVCTKSLYKELTVDTTFMDYPMLTGNLVALLSPAIFIPILTYVFKPQNFDWEKMKDITRVDETAELVQADPDIQLYDAEANDKEQEEETNSLVSDSEKNDVRVNNEKLIEPNLGVVISNAIFQEDDTQLQNELDEEQRELARGLKIAYFLCVFFALAFLVVWPMPMYGSKYIFSKKFFTGWVVVMIIWLFFSAFAVCIYPLWEGRHGIYTTLRGLYWDLSGQTYKLREWQNSNPQDLHVVTSQISARAHRQSSHFGQVDEII

SEQ ID NO: 2 - protein, 704 aa, Arabidopsis_thaliana
MATCPPFDFSTKYYDGDGGCQRQSSFFGGTTVLDQGVGYAVILGFGAFFAVFTSFLVWLEKRYVGARHTSEWFNTAGRNVKTGLIASVIVSQWTWAATILQSSNVAWQYGVSGPFWYASGATIQVLLFGVMAIEIKRKAPNAHTVCEIVKARWGTATHIVFLVFCLATNVVVTAMLLLGGSAVVNALTGVNLYAASFLIPLGVVVYTLAGGLKATFLASYVHSVIVHVALVVFVFLVYTSSKELGSPSVVYDRLKDMVAKSRSCTEPLSHHGQACGPVDGNFRGSYLTMLSSGGAVFGLINIVGNFGTVFVDNGYWVSAIAARPSSTHKGYLLGGLVWFAVPFSLATSLGLGALALDLPISKDEADRGLVPPATAIALMGKSGSLLLLTMLFMAVTSAGSSELIAVSSLFTYDIYRTYINPRATGRQILKISRCAVLGFGCFMGILAVVLNKAGVSLGWMYLAMGVLIGSAVIPIAFMLLWSKANAFGAILGATSGCVFGIITWLTTAKTQYGRVDLDSTGKNGPMLAGNLVAILTGGLIHAVCSLVRPQNYDWSTTREIKVVEAYASGDEDVDVPAEELREEKLRRAKAWIVKWGLVFTILIVVIWPVLSLPARVFSRGYFWFWAIVAIAWGTIGSIVIIGLPLVESWDTIKSVCMGMFTNDRVMKKLDDLNHRLRALTMAVPEAEKIYLLELEKTKKNDEEG

SEQ ID NO: 3 - protein, 731 aa, Zea_mays
MAAGGAVACPPPGLGFGGEYYSVVDGACSRDGSFFGGKPVLAQAVGYAVVLGFGAFFALFTSFLVWLEKRYVGSQHTSEWFNTAGRSVKTGLIASVIVSQWTWAATILQSSNVAWQYGVSGPFWYASGATIQVLLFGVMAIEIKRKAPNAHTVCEIVRARWGRAAHAVFLAFCLATNVIVTAMLLLGGSAVVNALTAINVYAASFLIPLGVVVYTLAGGLKATFLASYIHSVVVHVVLVVFVFLVYTSGNRLGSPRVVHDHLTAVASAVRNCSAPLSHPDQACGPVHGNFKGSYLTMLSSGGLVFGIINIVGNFGTVFVDNGYWMSAIAARPSSTHKGYLLGGLVWFAVPFSLATSLGLGALALDLPITAAEAAKGLVPPATATALMGKSGSVLLLIMLFMAVTSAGSAELVAVSSLCTYDIYRTYINPDATGEQILRVSRATVLVFGCLMGVLAVILNLVGVSLGWLYLAMGVIIGSAVIPIALLLLWRKANALGAILGAVSGCVLGVTVWLSVAKVQYGRVDLDSTGRNAPMLAGNLVSILVGGAVHAACSLAWPQHYDWESSRQITTVESVPADSDLAEELKEERLVHAKRWIIKWGVAFTAVIAVVWPVLSLPAGRYSAGYFTMWAVIAIAWGTVGAAVIIFLPLVESWDTICKVCEGMFTNNAVYERLDEMNLRLKAIMGDMPEAEERYQEMQKEKDLGTMEMVHPASGTRPSMVANDDEDNLSLA

SEQ ID NO: 4 - protein, 721 aa, Oryza_sativa
MASGVCPPAELGFGAEYYSVVNGVCSRAGSYFGGRPVLTQAVGYAVVLGFGAFFALFTSFLVWLEKRYVGSQHTSEWFNTAGRSVKTGLIASVIVSQWTWAATILQSSNVAWQYGVSGPFWYASGATIQVLLFGVMAIEIKRKAPNAHTVCEIVRARWGTPAHLVFLTFCLLTNVIVTAMLLLGGSAVVNALTGVNVYAASFLIPLGVVVYTLAGGLKATFLASYIHSVVVHAVLVVFVFLVYTSSSKLGSPRVVYDRLMAVASAARDCSADLSRNGQACGPVAGNFKGSYLTMLSSGGLVFGIINIVGNFGTVFVDNGYWMSAIAARPSSTHKGYLLGGLVWFAVPFSLATSLGLGALALDLPLTAAEAAKGLVPPATATALMGKSGSVLLLTMLFMAVTSAGSAELVAVSSLCTYDIYRTYLNPGASGKQILRVSRAVVLGFGCFMGVLAVVLNVAGVSLGWMYLAMGVIVGSAVIPIALLLLWSKANAVGAMGGAVSGCALGVAVWLTVAKVQYGRVNLDTTGRNAPMLAGNLVSILVGGAVHAACSLLRPQHYDWGTSREMITTVESVHAALDDELKEERLVHAKRWIVRWGLVFTAVIVVAWPALSLPARRYSLGYFTLWAAVAIAWGTVGSVVIILLPVAESWTTITKVCAGMFTNDAVYDRLDDVNLRLRAIMGAMPEAEKRYRQLHETEMHPAGTHPANDDDDDNNNNQMMHS

SEQ ID NO: 5 - protein, 713 aa, Physcomitrella_patens
MASTGCPANLPGLEYYTFANGVCSRQDSYFGGKPLLSQGIGYAVVLGFGALFALVTSFLVWLEQRYIFSRHNSEWFNTAGRNIKTGLIASVIVSQWTWAATILQSSNVAWQYGVSGPFWYASGATVQVLLFGVLAIEIKRKAPGAHTICEIIRARWGTATHIVFLCFCFATNIIVTAMLLLGGSAVVNALTGMNLYAASFLIPLGVVVYTLHGGLKATFLASYLHSVIVHAVLVVFVFLVYVTSEKLGSPKDVYAKLHSVVAIQDCTAPLNHNTQACGPVKGNNGGSYLTMLSTGGLVFGIINIVGNFGTVFVDNGYWMSAIAARPSSTHKGYLLGGLVWFAVPFSLATSLGLGSLALGLPLTADEANHGLVPPATATALLGKSGAILLLTMLFMAVTSAGSSELIAFSSLCTYDIYRTYVNPKATGKQILWVSRLIVLLFGCFMGVLAVVLNKAGVSLGWMYLAMGVFIGSAVIPVAFLLLWRKANAKGAICGSIIGMLAGVITWLVVTAVMYKRVNLDTTGRNAPMLAGNLVSILIGGAVHAVMSFVAPQNYNWDTTKHITMVELDASDVPDEEYSEAKLKHARAWIIKWGVGFTILIVIIWPIFALPAKVFSEGYFTFWAAIAIIWGTVGSAVIIFLPLYESWDTISFIVMGMFTSDIMYERLDDISSRLRAIMTSMPEAERLYLLEKEKHKIEEANESIMAKEKELNDG

SEQ ID NO: 6 - protein, 678 aa, Selaginella_moellendorffii
MADQCPPLAWAADYYVTVNGQCQRQSSYFGNRPSLSQGVGYGVVLGFGAFFAFFTSFLVWLEKRYIGAKHTSEWFNTAGRSIKTGLIASVIVSQWTWAATILQSSNVAWEYGVSGPFWYASGATIQVLLFGIIAIEIKRKAPSAHTVCEIVRARWGFEAHMVFLCFCFLTNVIVTAMLLLGGSAVVNALTGVDIYAASFLIPLGVIVYTLAGGLKATFLASYIHSVIVHVVLVIFVYLVYTSSSKLGSPSDVYRKLVAAASKERICSEPLSHAGQACGPVSGNYGGSYVTMLSSGGLVFGIINIVGNFGTVFVDNGYWMSAIAARPSSTHKGYLLGGLVWFAVPFSLATSLGLGALALDLPLTASEAGHGLVPPATATALMGNSGAILLLTMLFMAVTSAGSSELVAVSSLCTYDIYRTYINPKATGKQILRVSRLVVLSFGCFMGVLAVALNKAGVSLGWMYLAMGVMVGSAVMPIAFLLLWSKANAKGAIAGTIVGCIAGVTTWLSVTKAEYGRVNLDTTGRNAPMLAGNLVSILTGGAIHALLSYLQPESYTWDTTKNITMVEVDDKPEVSEEELSEAKLQHARKWIIRWGVGFTLLIAVLWPLASLPAKEFSLEYFTFWAVIAIVWGTVGSVVIILLPLVESWETIMLVLKGMFTFNSSPVEAKSHQTGVIAGP

SEQ ID NO: 7 - protein, 679 aa, Selaginella_moellendorffii
MADQCPPLAWAADYYVTVNGQCQRQSSYFGNRPSLSQGVGYGVVLGFGAFFAFFTSFLVWLEKRYIGAKHTSEWFNTAGRSIKTGLIASVIVSQWTWAATILQSSNVAWEYGVSGPFWYASGATIQVLLFGIIAIEIKRKAPSAHTVCEIVRARWGFEAHMVFLSFCFLTNVIVTAMLLLGGSAVVNALTGVDIYAASFLIPLGVIVYTLAGGLKATFLASYIHSVIVHVVLVIFVYLVYTSSSKLGSPSDVYRKLVAAASKERICSEPLSHAGQACGPVSGNYGGSYVTMLSSGGLVFGIINIVGNFGTVFVDNGYWMSAIAARPSSTHKGYLLGGLVWFAVPFSLATSLGLGALALDLPLTASEAGHGLVPPATATALMGNSGAILLLTMLFMAVTSAGSSELVAVSSLCTYDIYRTYINPKATGKQILRVSRLVVLSFGCFMGVLAVALNKAGVSLGWMYLAMGVMVGSAVMPIAFLLLWSKANAKGAIAGTIVGCIAGVTTWLSVTKAEYGRVNLDTTGRNAPMLAGNLVSILTGGAIHALLSYLQPESYTWDTTKNITMVEVDDKPEVSEEELSEAKLQHARKWIIRWGVGFTLLIAVLWPLASLPAKEFSLEYFTFWAVIAIVWGTVGSVVIILLPLVESWETIMLVLKGMFTFNSSPVETKKPHQTGVIAGP

SEQ ID NO: 8 - protein, 678 aa, Physcomitrella_patens
MAPCNFAAITAGAEYYFNDPLTGECTRQSSYFGGKAFLSQGVGYAVVLGFGALFAVVTSFLVWLEQRFVYSKHNSEWFNTAGRNIKTGLIASVIVSQWTWAATILQSSNVAWQYGVSGPFWYASGATVQVLLFGVLAIEIKRKAPAAHTICEIVRARWGKTAHIVFLCFCFATNIIVTAMLLLGGSAVVNALTGMNLYAASFLIPLGVVVYTLHGGLKATFLASYLHSVVVHVVLVVFVFLVYVKSDKLGTPKEVYNRLYSVSHDRDCTPPLNFDSQACGPVAGNNGGSYLTMLSTGGLVFGIINIVGNFGTVFVDNGYWMSAIAARPTSTHKGYLLGGLVWFAVPFSLATSLGLGSLALGLPLTADEANHGLVPPATATALMGKSGAVLLLTMLFMAVTSAGSSELIAFSSLCTYDIYRTYINPKANGKQILWVSRLLVLLFGCFMGVLAIVLNKAGVSLGWMYLAMGVFIGSAVIPVAFLLLWRKANAKGAIAGSVIGMLAGVITWLTVTEVMYKRVNLDTTGRNAPMLAGNLVSILTGGAVHAIFSVISPQNYDWSTTKHITMVEQDASDVPEEEYNEEKLKKARSWIIRWGIGFTILIVIIWPLMALPAKVFSEGYFTFWAAIAIIWGTVGSAVIIIMPIVESWETIYLIILGMICRSPAKVPKHISDEKTTAG

SEQ ID NO: 9 - protein, 710 aa, Ostreococcus_tauri
MTTCAQYETLTSGTCVRDTSFFGGKAVLPEGAGYGIVIGFGLFFSLATAIVMGLDKRYGGTNISSEYFNTAGRNVKTGLTASVIVSQWTWAATLLQSSNVAYQYGVSGPFWYASGATIQVLLFGMLAIQVKRYAPNAHTICEIIDARWGSDVQKVFIFFCFLTNVIVSSMLVLGGAATVNALTGMNTTAAGFLIPIGVIAYTMAGGLKATFLASYIHTAIIFAILITFIYIVYAADTKHGLGSPSKVYDLLQSVAARNVTSADCVARLAAGQNCGAVAKNQKGSYLTMLSEGGVIFGIINIVGNFGTVFVDQSYWQSAIAAKPSSSTKGYLLGGLVWFTIPFALATAMGLATVALDLPVTGDEAGKGLVPPAIATHLMGKGGAAAITIMLFMAIVSTGSAEQIAVSSLFAYDVYRKYIKPNATGEDILRVSRYGVVAFGLFMGILSLILDELGLSLGFVYLMMGIFIGSAVMPISFVLTWDKANAKGAVVGAISGQILGLITWIVTAQGLYKSVTIKTLGENYPMLAGNIVAICSSGIIHAFMSFQDPQNFDFSTLNDRIQLIDDKLPEFEQDEDSNPKQLEAALAWIQKWGLSFTFVMIILWPVLSLPAGCGTSAGCGVFNKGYFNLWVGIALAWGTVATAVIIFLPVYESWDSISVVLKGMFTNDDVHMRMDVLEKKIDALLAPGSEKSAENLSQQPGYRARLIAGHL

SEQ ID NO: 10 - protein, 709 aa, Ostreococcus_lucimarinus
MSCEQYETLVGSSCVRDTSFFGGKAVLPEGAGYGIVIGFGLFFSLATAIIMGLDKRYGGTNISSEYFNTAGRNVKTGLTASVIVSQWTWAATLLQSSNVAYQYGVSGPFWYASGATIQVLLFGMLAIQVKRYAPNAHTICEIIDARWGANVQKVFIFFCFLTNVIVSSMLVLGGAATVNALTGMNTTAAGFLIPIGVIAYTMAGGLKATFLASYIHTAIIFAILITFIYIVYAADTKHGLGSPSKVYDLLQSVAQRSPTSTECVARLAADQNCGPVAKNQKGSYLTMLSEGGVIFGIINIVGNFGTVFVDQSYWQSAIAAKPSSSTKGYLLGGLVWFTIPFALATAMGLATVALDLPVTSDEAGKGLVPPAIATHLMGKGGAAAITIMLFMAIVSTGSAEQIAVSSLFAYDVYRKYIKPNATGEDILRVSRYGVVAFGIFMGILSLILDELGLSLGFVYLMMGIFIGSAVMPISFVLTWDKANAKGAVIGAISGQVLGLVTWIVTAQGLYKAVTIKTLGENYPMLAGNIVAICSSGIIHAFMSFQDPQNFDFSTLNDRIQLIDDKLPEFEQDEDSNPKQLEAALAWIKKWGIGFTFVMIVLWPVFSLPAGCGTSAGCGVFNKGYFNLWVGIALAWGTVATAVIILLPVYESWDSISVVLKGMFTNDDVHMRMDVLESKIDALLAPGSTKSTEKLSQQPGYRAKLIAGHL

SEQ ID NO: 11 - protein, 668 aa, Ectocarpus_siliculosus
MTSVPEDYIDQDSFFGGEPPLSEAVGYVVVLIFGIFFSFFTTFLVWLDQKFNGVSITSEQFNTAGRSIKTGLTASVIVSQWTWAATLLQSSNVAFNYGVSGPFWYASGATVQVLLFGILAIEVKRKAPTCHTFLEIIQARWGDTAHKVFLFFALLTNIIVTSMLLLGGAATVNALTGLDLNLASFLIPWGVIAYTMAGGLKATFLASYTHTTVLFVALLIFVFVIYTGDDQYVGSPGAMFDKLQALVKLDDCTYGPASDPMKYELYACGPVDGNQEGSYLTMLSREGFIFGIINIVGNFGTVFVDQSYWQSAIAAKPQSSHKGYLLGGMCWFTIPFALATSLGLAALAMQLPLTGDEAGSGLVPPATALFVLGKGGATLILIMLFMAVTSTGSAELIAVSSLISYDVYRAYIKKDATGDEILKVSRITVFVFGALMGVLSIVLNEMGLNLGWVYLFMGVVIGSAVVPVSMVLTWKKATAKGAIAGAILGQICAIIGWLVSAQALEGEITIDSTGQNYPMLTGNLIAICFSGIVCIAVSLADPDDYDWESTRNIAMVETYDNAWHTEADYNDVDLSKAKNWIIKVGLSFTVVIVILWPVLSLPAGVFSEGYFDFWVALSILWGLVATMFVVFLPLYESKDAIVSVFKGMCGQAPAGKTVQQSSQQAPSA

SEQ ID NO: 12 - protein, 715 aa, Micromonas sp.
MASYCAYDSPTPEYYTDAATCTRQDSFFGGKAVLPEGAGYGIVIGFGVFFSLATGIIMKLNQRYGGLNLSSEFFNTAGRNVKTGLTASVIVSQWTWAATLLQSSNVAYQYGVSGPFWYASGATIQVLLFGMLAIQVKRYAPNAHTICEIIDARWGPSVQKVFIFFCFMTNIIVSSMLVLGGAATVNALTGMSTTAAGFLIPLGVIAYTMTGGLKATFLASYIHTAIIFSILITFIYIVYAGDDSKGLGSPDNVYKLLNSLTAQTKEVCADRISKKQNCGYVPKNEEGSYLTMLSEGGMIFGIINIVGNFGTVFVDQSYWQSAIAAKPSSSTKGYLLGGLVWFTIPFALATSMGLATVALDLPVTSTEAGMGLVPPAVASHLLGKGGAAAITIMLFMAIVSTGSAEQIAVSSLISYDVYRKYINVHATGEDILRVSRYGVVFFGVFMGLLSLILDEIGLSLGFVYLMMGIFIGSAVMPISFVLTWDKANGAGAVAGAFTGLILGLITWIATASGLEGKVTVDTLGMNYPMLAGNVVAICSSGIVHATMSFMNPQNFDFSTLNERIQLIDDTLPKFEEDEESNPKQLEESLKWIQKWGWGFTFIMIIVWPCLSLLAGCGTPTGCGVFNKGYFNLWVAIALTWGTVATAVIIILPVYESWAEISTTLQGMFTNDDVHMRMDIIDSKLDSLLKAGNLGESGNKLSKTDAYRAKLLAGKL

SEQ ID NO: 13 - protein, 704 aa, Phaeodactylum_tricornutum
MSTNTVSEITYDLPPFDKYRGQDSFFGGEPPLSEGVGYLVVLGFGFLFSIITTILVYLNKYFGARGEVTSEHFNTAGRMIKTGLTASVIVSQWTWAATLLQSSNVAWAYGVSGPFWYASGATIQVLLFGVLAINLKKVAPSAHTVAEIVNARWGKTAHLTFLFFCFAANIIVTSMLLLGGAATVEALTGMDYRLASFLIPWGVILYTASGGLQATFLASYIHTVIIYAVLITMIFLVYIKFYSSDQIYDFLDQTVSFTTEECEAIFSDDSGTFFEAGKYACGPVSGNEKGSYLTMISGDGLMFGIINIVGNFGTVFVDQSYWQSAIAAKPSSAARGYLLGGVCWFAIPFSLATSLGLASTALMLPITSTEAGNGLVPPAVAFELLGDAGAILILIMLFMAIVSTGSAESIAVSSLVAYDIYRQYINPEATGDQILFVSRVVIVVFGLFMGCFAILLFEIGLSLGWVYLFMGVVIGSAVVPLWNMMTWKKASGTGAVIAAWTGLVLAVTGWLVAAKVQSDTISVDALGTNEVMLSGNLIAILSSGAIHYVYSMFIDPQDYDFSELDKHITLVEQDTRGLTDEEKDPVALRRAERWITRRGYALTLVLIFIWPILSVPAGVFTKSYFAFWVLVAIAWGFGAALVITILPLTESAEDISMVLSGVFYAVTGREPRRAEDPAEAVAAEKEISEEMDKADAEVAAEMEA

SEQ ID NO: 14 - protein, 643 aa, Phaeodactylum_tricornutum
QGQDSYFGGEPPLSEGVGYLVVLGFGALFSVITTALVWRQRRCYLGALQVRRLNLTAGRSVKTGLTASVIVSQWTWVTLLQSSNVAWAYGVSGPFWYASGATIQVLLFGVLAINLKKVAPSAHTVAEIVNARWGKTAHLTFLFFCFAANIIVTSILLLGGAATVEALTGMDFRLASFLIPWGVLLYTASGGLQATFLASYIHTVIIYAVLITMIFLVYIKFYSSDQIYDFLDQTVSFTTEECEAIFSDDSGTFFEAGKYACGPVSGNEKGSYLTMISGDGLMFGIINIVGNFGTVFVDQSYWQSAIAAKPSSATRGYLLGGVCWFAIPFSLATSLGLASTALMLPITSTEAGNGLVPPAVAFELLGDAGAILILIMLFMAIVSTGSAESIAVSSLVAYDIYRQYINPEATGDQILFVSRVVIVVFGVFMGGFAILLFEIGLTLGWVYLFMGVVIGSAVVPLWNMMTWKKASGPGAVIAAWSGLALALTGWLVAAKVQSGTISVEALGTNQVMLSGNLIAIFSSGIIHYLYSTFVDPQDYDFAELDTHITLVEEDYRGLTEEEKDPVLLRRAERWITRRGYALTLFLIFLWPLLSIPAGVFTKSYFAFWVLIAIAWGFGAAIVITILPLTESAEDINMVLSGLF

SEQ ID NO: 15 - protein, 716 aa, Thalassiosira_pseudonana
MATPAFECPTDVCPPMFDQYAGQTSYFGGESPLSKAVGYLVVVGFGALFSIFTTMVVFADKKFAGNASITSEHFNTAGRMVKTGLTASVIVSQWTWAATLLQSSNVAWNYGVSGPFWYASGATIQVLLFGVLAISLKDIAPSAHTMCEIVRARWGKTAHLTFLFFAFCANIIVTSMLLLGGAATVEALTGVNYELASFLIPWGVILYTSAGGLKATFMASYLHTMIIFAVLITMITIVYVKAYSSDQIYDYLAQTVAYTKEECELLFSEDGTAETSFYLGEDGSKQYACGYVTGNNSGSYLTMLSSDGLMFGIINIVGNFGTVFVDQSYWQSAIAARPQSAARGYLLGGICWFAIPFSLATSLGLASTALMLPISKSEAGSGLVPPAVADHLLGSAGSALILIMLFMAIVSTGSAESIAVSSLVAYDVYREYWNPEATGKQILWVSRVVIVVFGIFMGLFSIALNEMGLNLGWVYLFMGVVIGSAVIPLWNMMTWSKASGKGAVIAAWSGLVLALIGWLVGAKIQGEAVTVATLGTNEVMLSGNLIAILSSGFIHYVYSKFIDPQDFDFATLDENIHLVEQDLSGLGAEQQDKNELRRAKRWIVRRGYLLTFVLILVWPILSVPAGIFTKDYFAFWVLVSIAWGFGAAIIISVLPLVESQEEIGNVFGGMWNYIRCKEGDINQYAEEEAAPAKTLDEEPTKEVEAEAPAADGEEAA

SEQ ID NO: 16 - protein, 821 aa, Volvox_carteri
MSTCDAASFASNIFNFPQYAKKCSFFEKGGDTALPQGLGWFILVGLGALFALIPTFLIWFDRKFGGTGKDSENFSTAGRSIKAGLTACDIVAKWTWAATLLQSSNVAFSFGISGPFWYAAGATVQVLLFAILAVEIKRKAPTIHTFLEVIRCRWGTTAHVIFTVYGFLTNIIVTAMLILGGAAVMEALSGVSVYAASFLIPAGVVVYTAVGGLKGTVVAEWLNVCIIYLALLIFMFQVYATHEDLGSIAAVYKMLRKVEKVHPVADNMGGSYLTMFSKSGIIFGIINIIGNFGTVFVDQSYWQGAIAAKPSATYRGYLLGGLCWFAIPFTFATTMGLGARALDLPLTKAEANQGLVPAALAVHLMGKGGAFLMTFQLFMAVTATACAEQMAVATIVAYDIYKPYINPNASGRAMINLQRVMVLVYAIISGVVSVILLKLEVSLGWVYLFMGIVIGSAVFPIAASLTWAKCSAKAACISAVVTTPLAIMTWLITAAKLNDGVINLDTTGQDYPMLAGNLVALFFSMILCIILSYIFPQDFDWAELRNIPVIESDPNSDPNNFEGEDSPEALNYVIKFTWATGGTLTLVLLILWPILTLPAKVFNQGYFTFWVIVAMVWGIVASVICIVLPIFEASDVIFAACIGKKPSKTAASAEESVQAGKESHLELPPAPVQASKQGTGVVEAALHATLRAWVGRDFVHSELRSYAITLVASSAGEVLVIVCPPSCLWMGTRWVWFFGVPALHSSDCFVVGMNISVKMGVRVGVRTAQRLYMCAVDVIPCGRAGPRASGMHLVIALDLLVFVVEVAVVIIGNSRTKRNRV

SEQ ID NO: 17 - protein, 653 aa, Chlamydomonas_reinhardtii
MRPRSAGDTALPEGLGWFILIGLGAVFALVPTFLLWADRKFGGTQADSENFATAGRSIKAGLTACDIVAKWTWAATLLQSANVAWSFGVSGPFWYAAGATVQVLLFAILAVEIKRKAPTIHTFLEIIRCRWGTTAHVIFVFYGFLTNIIVTAMLILGGAAVMEALTGVSVYASSFLIPAGVVIYTAVGGLKGTVVAEWLNVCVIYIALLIFMFQVYATNKDLGSIKVVYERLTAVAEKHPVADNMGGSYMTMFSKSGIIFGIINIIGNFGTVFVDQSYWQGAIAAKPSATYKGYLLGGMCWFAIPFTFATTMGLGARALDLPLTKAEANKGLVPPALAVALMGQGGAFLVTFQLFMAVTATACAEQMAVATIVAYDIYKPYINKNANGKQMIILQRVMVVVYAIISGVISVILLKLQVSLGWVYLFMGIVIGSAVFPIAASLTWAKCSATAAIVSAVVTTPLAIMTWLITAAKLNDGVINLDTTGQDYPMLAGNLVALFFSMILCIILSYIFPQDFDWAELRNIPVIECDPNSDPNNFEGEDSPEALNHVIKFTWATGGTLTLVLLILWPILALPAKVFSEGYFTFWIIIAMIWGIVASCVCIVLPIWEASDVIVNFFTWKKAPVAGGVATTAEESAHKGDHMELPPAPANRA

SEQ ID NO: 18 - protein, 721 aa, Chlamydomonas_reinhardtii
MSTCNNLFGFEEYNGQCEFFGEGPTVLPEGLGWFILVGLGAVFACVPTALIWLDRRFGNFGADSESFATAGRSIRAGLTACDIVAKWTWAATLLQSTNVAWKFGVAGPFWYAAGATVQVLLFAILAVEIKRKAPTIHTFLEIIRCRWGTTAHVVFTCYGFLTNIIVTAMLILGGAAVMEALTGVSVYAASFLIPAGVVMYTAVGGLKGTVVAEWLNVSVIYIVMLIFMFQVYATNPDLGSIATVYQRLAVMSIKYPVADNMGGSYMTMFSKSGIIFGIINIIGNFGTVFVDQSYWQGAIAAKPSATYRGYLLGGLCWFAIPFTFATTMGLGARALDLPITLEEANKGLVPPALAVHLMGQGGAFLMTLQLFMAVTATACAEQMAVATIVAYDIYKPYINKNADGRLMVKLQRITIVVYALVSGCVAVILLKLNVSLSWVYMFMGIVIGSAVFPIAASLTWAKCSATAACVSAVMTTPLSVMTWLIVAAKLNNGVLSLNTTGQDYPMLAGNLVALFLSMILCIILSYIFPQDFDWAELRNIPVLDSDPNADPNNFDGDDSPQALNKVVRFTWITSGILTLLLLILWPCLALPAMVFSQGYFTFWVMIAMIWGIVASAVCIMLPVIEASDLVAAVLRGKRLASNSSAHSSTHAQAAKAHPGPGGAPAAGADGGPGAAAAADAAAAVAVAVDGSGVEPVKSRSRQALVSAVLCVQLPTSRNARS

SEQ ID NO: 19 - protein, 645 aa, Volvox_carteri
GPTVLPEELGWFILAGLGAVFAFIPTCLIWLDRRFGGFGRDSESFSTAGRSIKAGLTACDIVAKWTWAATLLQSTNVAYSFGVSGPFWYAAGATVQILLFAILAVEVKRKAPTIHTFLEIIRCRWGTTAHVIFTVYGFLTNIIVTAMLILGGAAVMEALSGVSVYAASFLIPAGVVIYTAAGGLKGTVVAEWLNVCVIYIAMLVFMFQVYATHEDLGSIATVYIRLRMVEIKHPVADNMGGSYLTMFSKKGIIFGIINIIGNFGTVFVDQSYWQGAIAAKPSATYRGYLLGGLCWFAIPFTFATTMGLGARALDLPVSRTEADRGLVPAALAVHLMGKGGAFLMTLQLFMAVTATACAEQMAVATIVAYDIYKPYINRNADGRTMVMLQRVMVVTYAVISGVVSVILLKLNVSLNWVYLFMGIVIGSAVFPIAASLTWAKCSAKAACISAIVTTPLAIMTWLITAAKLNDGVINLDTTGQDYPMLAGNLVALFFSMILCIILSYIFPQDFDWAELRNIPVIESDPNSDPNNFEGEDSPEALNRVIRFTWATGGSLTLILLVLWPILALPAGVFSEAYFTFWVMVALVWGIVASAVCIMLPVIEASDVVVAVLRGRRLSSISNSSPQHSKETTAHLDQPTSTRLRT

SEQ ID NO: 20 - protein, 514 aa, Bacillus_pseudofirmus
MLSTSTGYLILFIFGSFFTILTIVMQRRRKTAMTAEQFSTAGRNVGVGLASASIIAAWTWAATLMMSSSTGFQYGISGPYWYAAGACIQVLLFAIVAIHLKRKAPKAHTFLEFIGKRFDKNNHKLMMVFALMTNIIVTSMVILGGAIALNSLTGMNIYIAAFLIPLTFTIYTMIGGLKASFIADYLNTVMIFVILTIFAAAVYMQFGVQTVYEGLRSLPESQQMLTMASIPGLLFGMINIIGNFGTVFVDQSYWQRAIASKDSAASKAYIYGGIAWFSIPFAIATFLGVTAAGLGLNVGDPDASAPLMAAHVLGTVGSILFLVMLFMAVMSTGAAELTAITNIIVTDIYRKSINPLASSAKTLKVSRIVTLSFGLAMGFFSILLFSIGIGLGFVYMAMGIFVSGAVIPLTIGLLWKRATNNGCFWGALLGMVSGVTVWNVSAYVMHGAINVESLGHLHSMLFGNLTVFIVSGVISIGHALMSNEQFDFEAMKDSFKSFDDEQEELIVVAKKEVV

SEQ ID NO: 21 - protein, 519 aa, Bacillus_megaterium
MLSSSVGYLILLIFGGGFTAVTIMMQRRQGKEMTAEQFSTAGRNVGVGLASASIIAAWTWAATLMMSSSTGYQYGISGPYWYAAGASIQILLFAIVAINLKKKAPNAHTFLEFIAQRFDVKNHRLMLGFALMTNIIVTAMVILGGAIALNSLTGMNIFVAAFLIPLTFTIYTMIGGLKASFVADYFNTVFIFIILFIFAAAVYYKFGVTSVYEGLKNLPSSQHMLTMASVPGLLFGMINIIGNFGTVFVDQAYWQRAIASKNSAASKAYIYGGIAWFSIPFAVATFLGVSAAGLGIAVDSPDSIAPVMASHVLGNLGSILFLTMLFMAVMSTGAAELTAITNIIVTDIYLRSINPKASSKKILSTSRKVTLGFGLAMGVFSILLFYLGISLGFVYMAMGIFVSGAVIPVTLGLMWKKATNTGAFYGALLGMIGGVVAWNTSAYLINGHIDVEALGGLYPMLIGNSTVFIISGVISIGHGLLAKKEFDFDELKDKFKSFDEHGDEPLREEVAYGSTTTVK

SEQ ID NO: 22 - protein, 522 aa, Lysinibacillus_sphaericus
MIEALLEPKMLMTIALMGTIVYITYLTKRNATASDFFVGGRSFGWFTNGSAIGGDYLSAATFLGIAGLTFQLGYDGAYYAFCFSIGLTLLAIFVAGPLRRFGAFTVADFLGYRFHSKRARLVAVAVVLAISGFYAAPQLLGAAQILSMFFGTSYEFGIIFTCVVMIFYVGIGGMKGTTINQALELWIRLGAFIVMLVAAVYSGLHYDKILAAINSFSGPISGTSPYALDGNEVNFDGAAWTGTGFYFPTFWQTISMTIGLALGTIGLPHILLRFYTNPSAKAARKSALMAIGIASTFFFLAVYLGVVGRSIFISGTASEEVMRDLVLGGNNMVIPTTALALGGKWLLGLVIAGAFAAIFSNLSGLFITSSGALAHDLYANIMKKDITQKQRVIAGKVAIVLLGILYGALGLLVKDASIGHLVALAFTVAASTFTPIFILGIWWRGMTEKGAIAGLLIGLGVSMWMIFLPGTLPSFLQFKIPGIVTVPVGFLSVIIVSLLDRKVPADVNEFMKRVHSKESETV

SEQ ID NO: 23 - protein, 522 aa, Lysinibacillus_fusiformis
MMEALLEPKMLMTIALMGTIVYITYLTKRNATASDFFVGGRSFGWFTNGSAIGGDYLSAATFLGIAGLTFQLGYDGAYYAFCFSIGLTLLAIFVAGPLRRFGAFTVADFLGYRFHSRRARLVAVAVVLAISGFYAAPQLLGAAQILSMFFGTSYEFGIIFTCVVMIFYVGIGGMKGTTINQALELWIRLGAFIVMLIAAVYGGLHYDKILAAIHSFSGPITGTSPYALDGNDINFDGAAWTGTGFYFPTFWQTISMTIGLALGTIGLPHILLRFYTNPSAKAARKSALMAIGIASAFFLLAVYLGVVGRSIFISGTASEEVMRDLVLGGNNMVIPTTALALGGKWLLGLVIAGAFAAIFSNLSGLFITSSGALAHDLYANIMKKDITQKQRVIAGKVAIVLLGILYGALGLLVKDASIGHLVALAFTVAASTFTPIFILGIWWRGMTEKGAIAGLLIGLGVSMWMIFLPGTLPSFLQFKIPGIVTVPVGFLSVIIVSLIDRKVPADVNDFMKRVHSKESETV

SEQ ID NO: 24 - protein, 522 aa, Bacillus sp.
MMGALLEPKMLMTIALMGTIVYITYLTKRNATASDFFVGGRSFGWFTNGSAIGGDYLSAATFLGIAGLTFQLGYDGAYYAFCFSIGLTLLAIFVAGPLRRFGAFTVADFLGYRFHSKRARLVAVAVVLAISGFYAAPQLLGAAQILSMFFGTSYEFGIIFTCIVMIFYVGIGGMKGTTINQALELWIRLGAFIVMLVAAVYSGLHYDKILAAINSFSGPITGTSPYALDGNDVNFDGAAWTGTGFYFPTFWQTISMTIGLALGTIGLPHILLRFYTNPSAKAARKSALMAIGIASTFFLLAVYLGVVGRSIFISGTASEEVMRDLVLGGNNMVIPTTALALGGKWLLGLVIAGAFAAIFSNLSGLFITSSGALAHDLYANIMKKDITQKQRVIAGKFAIVLLGILYGALGLLVKDASIGHLVALAFTVAASTFTPIFILGIWWRGMTEKGAIAGLLIGLAVSMWMIFLPGTLPSFLQFKIPGIVTVPVGFLSVIIVSLLDRKVPADVNDFMKRVHSKESETV

SEQ ID NO: 25 - protein, 493 aa, Bacillus_pumilus
MSIEVTISLSIYFIGMLAIGWHAFRKTHDLNDYMLGGRGLGPFVTALSAGAADMSGWMLMGVPGEMYKTGLSTTWLAIGLIVGAYLNYLILAPRLRSYTEIADDAITIPDFFDKRFKGSSSLLKAVSAVIILIFFTLYTSSGMVSGGRLFESAFGAHYMFGLILTSSIVILYTLFGGFLAVSLTDFVQGAIMFLALVLVPIVAFTQLGGPVATFQDIQQIDPKLLDIFRGTSVIGIISFLAWGLGYFGQPHIIVRFMAITSVKDLKPARRIGMSWMIISVIGSLSVGLVGVAYVHETGMNLADPETIFIVFSKVLFHPYITGFLLSAILAAIMSSISSQLLVTASAMTEDLYRTFFRKKASDKELVMIGRMSVLVVAVIALCLSLNPSDTILDLVGYAWAGFGSSFGPVILLCLYWKRMNHHGALVGMIVGAVVVLTWITTGLNHATGIYEMIPGFTLSGLAAIIVSLLTSKPSKASKQLFNKMENHLEEETK

SEQ ID NO: 26 - protein, 488 aa, Bacillus_cereus
MLTLTSISIYMLGMLVIGYFAYKRTSNLTDYMLGGRTLGPAVTALSAGASDMSGWLLMGLPGAMFSVGLSSSWIAFGLTLGAYANWLYVAPRLRTYSEIANNSITIPEFLEHRFHDKSHMLRLVSGLVIMIFFTFYVASGLVSGAVLFENSFGINYHVGLLIVASVVVAYTLFGGFLAVSWTDFVQGIIMVIALILVPIVTIMNSNGLGPAFDTIRSVDPTRLDIFKGASTLGMISLFAWGLGYVGQPHIIVRFMAISSVKEIKSARRIGMSWMIFSVVGAMFTGLIGIAYYSQQDLTLSNPETIFLELGKILFHPLITGFLLAAILAAIMSTISSQLLVTSSAVTEDLYRTFFKRSASDKELVFVGRMAVLGVALIGCALALKQNDTILALVGYAWAGFGSSFGPAILLSLYWKRMTKWGALAGMISGAATVIIWTQFKFLKDFLYEMIPGFAISLIVIIIVSLLTKPSKEVEEQFENFEKQHIHNL

SEQ ID NO: 27 - protein, 484 aa, Bacillus_cereus
MLILTSISIYMLGMLIIGYFAYKRTSNLTDYMLGGRTLGPAVTALSAGASDMSGWLLMGLPGAMFSVGLSSSWIAIGLTLGAYANWIYVAPRLRTYSELANNSITIPEFLEHRFHDTSHMLRLVSGLVIMIFFTFYVASGLVSGAVLFQNSFGMNYHVGLFIVAAVVVAYTLFGGFLAVSWTDFVQGIIMVVALILVPVVTIMNVNGLGPAFDTIQSIDPTLLNIFEGTSVLGIISLFAWGLGYVGQPHIIVRFMAIASVKDIKSARRIGMSWMIFSVVGAMFTGLIGIAYYSKAELTLSNPETIFLELGKILFHPLITGFLLAAILAAIMSTISSQLLVTSSAVTEDLYRTFFKRSASDRELVFVGRMAVLGIALIGCALAFKQNDTILALVGYAWAGFGSSFGPAILLSLYWKRMTKWGALAGMIAGAATVITWTQFKFLKDFLYEMIPGFAVSLIVIIIVSLLTKPSKEVEKQFEEFEKIA

SEQ ID NO: 28 - protein, 493 aa, Bacillus_pumilus
MSIEIGISLSIYFIGMLAIGWYAFRKTNDLNDYMLGGRGLGPYVTALSAGASDMSGWMLMGLPGAMYTTGLSSGWLAVGLISGAYLNYLFLAPRLRSYTEVADDAITIPDFFDKRFKDSSTLLKAVSAVIIMIFFTLYTSSGMVSGGRLFESAFGANYMFGLILTSSIVILYTLFGGFLAVSLTDFVQGAIMFLALVLVPIVAFTQLGGPIATYQDIQQIDPKLLDIFRGTSVIGIISFLAWGLGYFGQPHIIVRFMAITTVKDLKPARRIGMSWMIVSVIGSLSVGLVGVAYVHETSTTLADPETIFIVFSKVLFHPYITGFLLSAILAAIMSSISSQLLVTASAMTEDLYRTFFRRKASDKELVMIGRMSVLVVAIIALCLSLNPSDTILDLVGYAWAGFGSSFGPVILLCLYWKRMNHHGALAGMVVGAVVVLTWISTGLNNTTGLYEMVPGFILSGLTAIIVSLLTNKPSKASKKLFTKMENHLEEETK

SEQ ID NO: 29 - protein, 486 aa, Bacillus_cereus
MLTLTSISIYMLGMLVIGYFAYKRTSNLTDYMLGGRTLGPAVTALSAGASDMSGWLLMGLPGAMFSVGLSSSWIAIGLTLGAYANWLYVAPRLRTYSEMANNSITIPEFLEHRFHDKSHMLRLVSGLVIMIFFTFYVASGLVSGAVLFENSFGMNYHVGLFIVAGVVVAYTLFGGFLAVSWTDFVQGIIMVVALILVPIVTIMNSHGLGPAFDTIRSVDPTRLDIFKGASTLGIISLFAWGLGYVGQPHIIVRFMAISSVKEIKSARRIGMSWMIFSVVGAMFTGLIGIAYYSQQELTLSNPETIFLELGKILFHPLITGFLLAAILAAIMSTISSQLLVTSSAVTEDLYRTFFKRSASDKELVFVGRMAVLGIALIGCALAFKQNDTILALVGYAWAGFGSSFGPAILLSLYWKRMTKWGALAGMISGAATVIIWTQFKFLKDFLYEMIPGFAISLLVIIIVSLLTQPSKEVEEQFEDFEKQHNL

SEQ ID NO: 30 - protein, 488 aa, Bacillus_cereus
MLTLTSISIYMLGMLVIGYFAYKRTSNLTDYMLGGRTLGPAVTALSAGASDMSGWLLMGLPGAMFSVGLSSSWIAIGLTLGAYANWLYVAPRLRTYSEIANNSITIPEFLEHRFHDKSHMLRLVSGLVIMIFFTFYVASGLVSGAVLFENSFGMNYHIGLFIVASVVVAYTLFGGFLAVSWTDFVQGIIMVVALILVPIVTIMNANGLGPAFDTIRSVDPTRLDIFKGASTLGMISLFAWGLGYVGQPHIIVRFMAISSVKELKSARRIGMSWMIFSVVGAMFTGLIGIAYYSQQELTLSNPETIFLELGKILFHPLITGFLLAAILAAIMSTISSQLLVTSSAVTEDLYRTFFKRSASDKELVFVGRMAVLGIALVGCALAFKQNDTILALVGYAWAGFGSSFGPAILLSLYWKRMTKWGALAGMISGAATVIIWTQFKFLTNFLYEMIPGFTISLLAIVIVSLLTQPSKEVEEQFENFEKQHSDSL

SEQ ID NO: 31 - protein, 474 aa, Bacillus_cereus
MNTVDILLMVGYFFIIISIGFIGARKAKTSEDFMVAGRSLGLVMYLACLAAVILGGASTIGTARLGYEFGISGIWLVTMIGIGIILLGIFLVKKVSKFKIITISELLGLRFNSQTRLITSLITFIYVTMITVTQVIGMGTILNVLLGWDIKLCMLLGGSVVVMYTLLGGMWSVTMTDIFQFIVMTIGVFAIMLPLSLQKAGGWAALQETLPHGYFEIANIGGDKIFSYFLLYCLGVLIGQDIWQRIFTAKTVGIAKKGTIGAGVYCLLYAVAISIIGMCAAVVFPNLSDPQSAFITMAITILPAGLLGIVIASVVSALMSTASATLLASSTLIVNDIIKGTSSKELSEKTMIRMSRIVTLIIGIFVIVSAIWIQDVIVALDVAYAILSGSVFFPIILGLFWKRVTDKAAFYSIILSATVTVGGLIVQGLSATDPILYGMACSILSIVIISYLTSPEFEKYEEWKEQHTNVDIDA

SEQ ID NO: 32 - protein, 488 aa, Bacillus_cereus
MLTLTSISIYMLGMLVIGYFAYKRTSNLTDYMLGGRTLGPAVTALSAGASDMSGWLLMGLPGAMFSVGLSSSWIAFGLTLGAYANWLYVAPRLRTYSEIANNSITIPEFLEHRFHDKSHMLRLVSGLVIMIFFTFYVASGLVSGAVLFENSFGMNYHVGLLIVAGVVVAYTLFGGFLAVSWTDFVQGIIMVVALILVPIVTIMNTNGLGPAFDTIRSVDPTRLDIFKGASTLGMISLFAWGLGYVGQPHIIVRFMAISSVKEIKSARRIGMSWMIFSVVGAMFTGLIGIAYYSQQGLTLSNPETIFLELGKILFHPLITGFLLAAILAAIMSTISSQLLVTSSAVTEDLYRTFFKRSASDKELVFVGRMAVLGIALIGCALALKQNDTILALVGYAWAGFGSSFGPAILLSLYWKRMTKWGALAGMISGAATVIIWTQFKFLKDFLYEMIPGFAISLIVIIIVSLLTKPSKEVEEQFENFEKQHIHNL

SEQ ID NO: 33 - protein, 488 aa, Bacillus_cereus
MLTLTSISIYMLGMLVIGYFAYKRTSNLTDYMLGGRTLGPAVTALSAGASDMSGWLLMGLPGAMFSVGLSSSWIAVGLTLGAYANWLYVAPRLRTYSEIANNSITIPEFLEHRFHDKSHMLRLVSGLVIMIFFTFYVASGLVSGAVLFENSFGINYHVGLLIVAGVVVAYTLFGGFLAVSWTDFVQGIIMVVALILVPIVTIMNTNGLGPAFDTIRSVDPTRLDIFKGTSTLGMISLFAWGLGYVGQPHIIVRFMAISSVKEIKSARRIGMSWMIFSVVGAMFTGLIGIAYYSQQGLTLSNPETIFLELGKILFHPLITGFLLAAILAAIMSTISSQLLVTSSAVTEDLYRTFFKRSASDKELVFVGRMAVLGVALIGCALALKQNDTILALVGYAWAGFGSSFGPAILLSLYWKRMTKWGALAGMISGAATVIIWTQFKFLKDFLYEMIPGFAISLIVIIIVSLLTKPSKEVEEQFENFEKQHIHNL

SEQ ID NO: 34 - protein, 488 aa, Bacillus_cereus
MLTLTSISIYMLGMLVIGYFAYKRTSNLTDYMLGGRTLGPAVTALSAGASDMSGWLLMGLPGAMFSVGLSSSWIAFGLTLGAYANWLYVAPRLRTYSEIANNSITIPEFLEHRFHDKSHMLRLVSGLVIMIFFTFYVASGLVSGAVLFENSFGMNYHFGLFIVAGVVVAYTLFGGFLAVSWTDFVQGIIMVVALILVPIVTIMNSHGLGPAFDTIRSVDPTRLDIFKGASTLGMISLFAWGLGYVGQPHIIVRFMAISSVKEIKSARRIGMSWMIFSVVGAMFTGLIGIAYYSQQELTLSNPETIFLELGKILFHPLITGFLLAAILAAIMSTISSQLLVTSSAITEDLYRTFFKRSASDKELVFVGRMAVLVIALVGCALAFKQNDTILALVGYAWAGFGSSFGPAILLSLYWKRMTKWGALAGMISGAATVIIWTQFKFLKDFLYEMIPGFAISLIVIIIVSLLTKPSKDVEEQFENFEKQHSHNL

SEQ ID NO: 35 - protein, 492 aa, Bacillus_cereus
MSTQMLTLTSISIYMLGMLVIGYFAYKRTSNLTDYMLGGRTLGPAVTALSAGASDMSGWLLMGLPGAMFSVGLSSSWIAIGLTLGAYANWLYVAPRLRTYSEIANNSITIPEFLEHRFHDKSHMLRLVSGLVIMIFFTFYVASGLVSGAVLFENSFGMNYHVGLFIVAGVVVAYTLFGGFLAVSWTDFVQGIIMVVALILVPIVTIMNSNGLGPAFDTIRSVDPTRLDIFKGASTLGMISLFAWGLGYVGQPHIIVRFMAIASVKELKSARRIGMSWMIFSVVGAMFTGLIGIAYYSQQELTLSNPETIFLELGKILFHPLITGFLLAAILAAIMSTISSQLLVTSSAVTEDLYRTFFKRSASDKELVFVGRMAVLGIALVGCALAFKQNDTILALVGYAGAGFGSSLGPAILLSLYWKRMTKWGALAGMISGAATVIIWTQFKFLRDFLYEMIPGFAISLLAIVIVSLLTQPSKEVEEQFEDFEKQHRHNL

SEQ ID NO: 36 - protein, 468 aa, Bacillus_megaterium
MNGMDMTVMFVYFGVLVVAGIIGSLKAKSSEDFILAGRNLGMFMYLGCLSAVILGGASTIGTAQLGYEHGLSGIWFVTMIGLGIITLGTIFIKRISSLKVTTISELLGKRYNAQAQIISAVVAAIYTLMVSVTQVIGMGTIIHALLGWNMTASMLIGGSIVLFYTILGGMWSVTVTDIIQFVVMTVAIFGFMLPMSVSEAGGFKALAGDLPSSYFDFSSIGYGQIFQYFLLYTLGMAVSQDIWQRVFTARTEKIARNGSIFAGVYSIAYAIAGSVIGMCAYLLLPNAESSQSIFATLAVQILPQGLLGLVLAGVCSALMSTASGTLLASSTLISNDIIKKVWLKNISEKNYLILTRVNTLIVGVLAIIFALWIQDVLVALDVAYAILSGAIFVPFVVSLFWKDIHPKAGVSAIIVSTLVVLGGLLIEGLSSTTPILYGISSSIIVMAGFAVMARNKELSDQDKVQEDM

SEQ ID NO: 37 - protein, 478 aa, Bacillus_megaterium
MTHNKEESVMNGLDMTVMFVYFGVLVVAGIIGSLKAKSSEDFILAGRNLGMFMYLGCLSAVILGGASTIGTAQLGYEHGLSGIWFVTMIGLGIITLGTIFIKRISSLKVTTISELLGKRYNAQAQIISAVVAAIYTLMVSVTQVIGMGTIIHALLGWNMTASMLIGGSIVLFYTILGGMWSVTVTDIIQFVVMTVAIFGFMLPISVSEAGGLKALAGDLPSSYFDFSSIGYGQIFQYFLLYTLGMAVSQDIWQRVFTARTEKIARNGSIFAGVYSIAYAIAGSVIGMCAYLLLPNAESSQSIFATLAVQILPQGLLGLVLAGVCSALMSTASGTLLASSTLISNDIIKKVWLKNISEKNYLILTRVNTLIVGVLAIVFALWIQDVLVALDVAYAILSGAIFVPFVVSLFWKDIHPKAGVSAIVVSTLVVLGGLLIEGLSSTTPILYGISSSIIVMAGFAVMARNKELSDREPVSEDVK

SEQ ID NO: 38 - protein, 492 aa, Bacillus_weihenstephanensis
MSTQMLTLTSISIYMLGMLVIGYFAYKRTSNLTDYMLGGRTLGPAVTALSAGASDMSGWLLMGLPGAMFSVGLSSSWIAIGLTLGAYANWLYVAPRLRTYSEIANNSITIPEFLEHRFHDKSHMLRLVSGLVIMIFFTFYVASGLVSGAVLFENSFGMNYHVGLLIVAGVVVAYTLFGGFLAVSWTDFVQGIIMVVALILVPIVTIMNTNGLGPAFDTIRSVDPTRLDIFKGASTLGMISLFAWGLGYVGQPHIIVRFMAISSVKEIKSARRIGMSWMIFSVVGAMFTGLIGIAYYSQQGLTLSNPETIFLELGKILFHPLITGFLLAAILAAIMSTISSQLLVTSSAVTEDLYRTFFKRSASDKELVFVGRMAVLGVALIGCALALKQNDTILALVGYAWAGFGSSFGPAILLSLYWKRMTKWGALAGMISGAATVIIWTQFKFLKDFLYEMIPGFAISLIVIIIVSLLTKPSKEVEEQFENFEKQHIHNL

SEQ ID NO: 39 - protein, 474 aa, Bacillus_cereus
MNTVDILLMAGYFIIIIGIGLIGARKAKTSEDFMVAGRSLGLVMYLACLAAVILGGASTIGTARLGYEFGISGIWLVVMIGIGIILLGIFLVKKVSRFKIITISELLGLRFNSQTRVITSLITFIYVTMITVTQVIGMGTILNVLLGWDIKLCMLLGGSVVVMYTLLGGMWSVTMTDIFQFIVMTIGVFAIMLPLSLDKAGGWSALQEKLPHSYFEIANIGGDKIFSYFLLYCLGVLIGQDIWQRIFTAKTVGIAKKGTIGAGVYCLLYAVAISIIGMCAAVVFPNLSDPQSAFITMAITILPVGLLGIVIASVVSALMSTASATLLASSTLIVNDIIKSTTSKNMSEKAVIRTSRILTLIIGIFVMISAVWIQDVIVALDVAYAILSGSVFFPIILGLFWKRVTDKAAFYSIILSAIVTIVGLIVQGLSATDPILYGMVCSVLSIFIISYLTSPEFEKYEEWKEQHTNADVDA

SEQ ID NO: 40 - protein, 488 aa, Bacillus_thuringiensis
MLTLTSISIYMLGMLVIGYFAYKRTSNLTDYMLGGRTLGPAVTALSAGASDMSGWLLMGLPGAMFSVGLSSSWIAIGLTLGAYANWLYVAPRLRTYSEIANNSITIPEFLEHRFHDKSHMLRLVSGLVIMIFFTFYVASGLVSGAVLFENSFGMNYHVGLFIVAGVVVAYTLFGGFLAVSWTDFVQGIIMVVALILVPIVTIMNSNGLGPAFDTIRSVDPTRLDIFKGASTLGMISLFAWGLGYVGQPHIIVRFMAISSVKELKSARRIGMSWMIFSVVGAMFTGLIGIAYYSQQELTLSNPETIFLELGKILFHPLITGFLLAAILAAIMSTISSQLLVTSSAVTEDLYRTFFKRSASDKELVFVGRMAVLVIALVGCALAFKQNDTILALVGYAWAGFGSSFGPAILLSLYWKRMTKWGALAGMISGAVTVIIWTQFKFLKDFLYEMIPGFAISLLAIVIVSLLTQPSKEVKEQFEDFEKQHRHNL

SEQ ID NO: 41 - protein, 488 aa, Bacillus_mycoides
MLTLTSISIYMLGMLVIGYFAYKRTSNLTDYMLGGRTLGPAVTALSAGASDMSGWLLMGLPGAMFSVGLSSSWIAIGLTLGAYANWLYVAPRLRTYSEIANNSITIPEFLEHRFHDKSHMLRLVSGLVIMIFFTFYVASGLVSGAVLFENSFGMNYHIGLFIVAGVVVAYTLFGGFLAVSWTDFVQGIIMVVALILVPIVTIMNANGLGPAFDTIRSVDPTRLDIFKGASTLGIVSLFAWGLGYVGQPHIIVRFMAISSVKELKSARRIGMSWMIFSVVGAMFTGLIGIAYYSQQDLTLSNPETIFLELGKILFHPLITGFLLAAILAAIMSTISSQLLVTSSAVTEDLYHTFFKRSASDKELVFVGRMAVLGIALVGCALAFKQNDTILALVGYAWAGFGSSFGPAILLSLYWKRMTKWGALAGMISGAATVIIWTQFKFLTNFLYEMIPGFTISLLAIIIVSLLTQPSKEVEEQFEDFEKQHSHSL

SEQ ID NO: 42 - protein, 478 aa, Geobacillus_kaustophilus
MNGIILAELVLYCLVMAALGYWYGKKEMSHSDFLLGGKKLPGWALAFSERATGESAWLLLGYTGFVFASGLSAIWVAVGIVIGIIGAWLFLADRFRQEAERYGALTLPGYLAKRFGAHGQTILWLATVLIFSFMMFYFSAQIAGAGKTLFTVFHIDPALGMVISVAIVIILSYTGGFVSVVWTDMIQSVLMLATLVILPIVAVVEIYSGGLSISEALHHAKPGLDSWTGGVTGFALGLLLFNNFAWFFGYLGGQPQLSVRFMALKDAREAKTAKTVAIVWTLLAYGGAFLIGLAAIALYQGQSFTDVETVLPKMVLDLLPPWLAGLLLSGILAAIVTTADSQLLVITSSISEDIVRRSLRLRLSERQLVALSRAVVVIAGLLGLVLAMTSESLVYFIVSWAWAGIGCTLSPAILLSFFWKRYSGIGAIATIVAGFVSTVIWISSPLEAIISSRFTTSAIALVAGVLFSLLFPDRQRTM

SEQ ID NO: 43 - protein, 488 aa, Bacillus_cereus
MLTLTSISIYMLGMLVIGYFAYKRTSNLTDYMLGGRTLGPAVTALSAGASDMSGWLLMGLPGAMFSVGLSSSWIAIGLTLGAYANWLYVAPRLRTYSEIANNSITIPEFLEHRFHDKSHMLRLVSGLVIMIFFTFYVASGLVSGAVLFENSFGMNYHVGLFIVAGVVVAYTLFGGFLAVSWTDFVQGIIMVVALILVPIVTIMNSNGLGPAFDTIRSVDPTRLDIFKGASTLGMISLFAWGLGYVGQPHIIVRFMAISSVKELKSARRIGMSWMIFSVVGAMFTGLIGIAYYSQQELTLSNPETIFLELGKILFHPLITGFLLAAILAAIMSTISSQLLVTSSAVTEDLYRTFFKRSASDKELVFVGRMAVLVIALVGCALAFKQNDTILALVGYAWAGFGSSFGPAILLSLYWKRMTKWGALVGMISGAATVIIWTQFKFLKDFLYEMIPGFAISLLAIVIVSLLTQPSKEVEEQFEDFEKQHLHNL

SEQ ID NO: 44 - protein, 502 aa, Bacillus sp.
METGVFISLALYFIAMLGIGLYAYKTSTDDISGYMLGGRKLGPGVTALSAGASDMSGWMLMGLPGAMYASGVSSMWIAIGLTIGAYVNYLVVAPRLRVYTETANDSITIPDFFENRFYDGTRILRFVSAIVIIIFFTLYTSSGLVSGGTLFDSAFGLDYKTGLFVTAGVVVAYTLFGGFLAVSLTDFVQGVIMLLALVLVPIVAFTDLGGVGVTLDEVRAIDPTYLDFFKGTTVLGIISLLAWGLGYFGQPHIIVRFMAIKSIRDFKAARRIGMSWMIVSIIGAMATGLVGIAYVNRTGMELADSETIFIVFSQFLFNPLISGFLLAAILAAIMSTISSQLLVTSSALTEDFYKTFLRREASDKELVLIGRISVLIVALVAISLSLTPNDTILNLVGNAWAGFGAAFGPVVILSLYWKRMNRWGALAGMLVGTITVLIWIYGPFTINGEPLTDFLYEIIPGFILSTIAVIVVSYITNFPRKKVREGFTEMEETMETETNKVD

SEQ ID NO: 45 - protein, 475 aa, Bacillus_cereus
MLVIGYFAYKRTSNLTDYMLGGRTLGPAVTALSAGASDMSGWLLMGLPGAMFSVGLSSSWIAIGLTLGAYANWLYVAPRLRTYSEIANNSITIPEFLEHRFHDKSHMLRLVSGLVIMIFFTFYVASGLVSGAVLFENSFGMNYHVGLFIVAGVVVAYTLFGGFLAVSWTDFVQGIIMVVALILVPIVTIMNSNGLGPAFDTIRSVDPTRLDIFKGASTLGIISLFAWGLGYVGQPHIIVRFMAISSVKELKSARRIGMSWMIFSVVGAMFTGLIGIAYYSQQELTLSNPETIFLELGKILFHPLITGFLLAAILAAIMSTISSQLLVTSSAVTEDLYRTFFKRSASDKELVFVGRMAVLVIALVGCALAFKQNDTILALVGYAWAGFGSSFGPAILLSLYWKRMTKWGALAGMISGAATVIVWTQFKFLTNFLYEMIPGFSISLIAIIIVSLLTQPSKEVEEQFENFEKQHRHNL

SEQ ID NO: 46 - protein, 472 aa, Cyanobium sp.
MLPQGTAWILLVGFSVLWIALGIWWGKRGKGDADDYLLAGRNIGLALSTATLMASWVTGNTTLAAPEVGYTLGLWGMFGYALAGLGLFLFAPLAVRIKRLMPTARTSGDFVRLRYGRACWAIFLLITMAYTLGFLITQGMGAGLLLQSLSGFDYRLGMVCVIGVSTIYTLFGGMRAVVGTDFIQSMLIMGLLVLVAVLGFSRFSSDQVYAALAAENPSRLNLLLPTGLLFAWNTGLFSMGEVFHNNIWWSRVFASRSSVVFRSFVLGGLAWVTVPVVTGAIALTALAQNLPIPQVNMVFPIVTAQLLGSGGAAVVFVIIFASLTSTLDSLLAASADLIAEDVVAHWLKPDASDHQVRQVARQVVVGLGLLTMVLSWQYITSMYQLLLFTGALVASTIWPIAMGLYWRQANRQAASLAMVLGSVTGLLAYWLIAPYCAALISAAVSAVVMGLGSRCWPERFDWRRLAGTAESA

SEQ ID NO: 47 - protein, 589 aa, Cyanobium sp.
MHTIDWLILIGYLVASLVLGLWLARRNRNEADYFVAGRRLSGWLAGASMAATTFSVDTPLYVAGLVGVRGLAGNWEWWSFGVAHVAMAVVFAPLWRRSGVLTDAAFTELRYGGATAAWLRGIKAFLFALPINCIGIGYAFLAMAKVSEALGLAPTPQARLTLLAIVGVLVLVYTAAGGLWAVVVTDMVQLVLALVGATAVAVAAVHAAGGMDALLASLRALERPELLSLVPWQLRDGQLRWIDSAGISISTFSAYIALQWWSFRRSDGGGEFIQRLLATRNEREARVASWVFLGVNYLLRSWPWILVALAAVVLLPDQTDWEQSYPLLAVRLLPPVALGLVVVSLVAAFMSTVSTAVNWGASYLTHDLYQRFMRPAASQRELLLVGQMASVLLVVLGVLTALLSNSIGTVFRLVIAIGTGPGVVLVLRWFWWRVNAAAELAAMLGGFVVGFGTSVVPLLRIDDYGERLLATTGITAVLWLVAMLATPPESAEVLERFVLQVKPAGPGWRHWRQRTGVEPQESLLDLLAQLAFSCAVLFGALLGLGGFLLKLPLWGWGGLVTAVLGTLALRQLPQLQGSLRRALGQTPQG

SEQ ID NO: 48 - protein, 735 aa, Saccharomyces_cerevisiae; identical to SEQ ID NO: 1

SEQ ID NO: 49 - protein, 724 aa, Candida_glabrata
MGEFKAPLPQGAGYAIVLGLGTVFAVGMILTTYMLRRYQKEIITAEEFTTAGRTVKTGLVAAAVVSSWIWCSTLLTSASKQLDGMLGGYSYSAGACFQIVAFAILAIKTKQKAPNAHTYLELVRKRYGKIGHCCYLFYAFATNILVTAMLLTSGAAVFESMTGMNSVASCFLLPVGVVIYTLFGGIKATFLTDFIHTCVIIVIIMVFAFKVYATSDVLGSPGKVYDLVREAAKRHPVPHNAQGEYLTMSSRSGGIFLIINLVGNFGTVFLDNGYWNKAISASPAAALPGYVMGGLAWFAVPALLSVTMGFACLATETLKSFPTYPDPLTPEQVSAGLVLPAAAVSVMGKGGAVATCLMVFMAVTSAMSAELIAVSSVFTYDIYRIYINPSADGKRLIYSSHFACVVFGLCMSGFSVGLYYAGVNLGYLYELMGIIISSAVLPVVLTLCWKGQNIIAAVVSPILGTALAIMSWLVCTKSLYGEITLATSFEDYPMLTGNLVALLSPAIFIPILTFLFKPQNYDMELFKEISRVDETKEILEAYPEIEPIISKTQIAHESEGSLIESDYNKEDEKDAVTHIKTTEKHELDRIDTENLSEYDAQEEKKLKRALNWAYFLCIFFALAFLVVWPMPMYGTKYIFSKRFFTGWVVVMIIWIFISAFCVCVFPVWEGRHGIYTTCRGIYWDLTGQSYKLKEWQETNPSELHVVQSQKSIRPKISRIDDLIE

SEQ ID NO: 50 - protein, 744 aa, Lachancea_thermotolerans
MPSSLEGSPSIETFKQEMALIESPLPQGAGYAVVVGLGFVFAFGMILTTYMLKRYQKEIITAEEFATAGRTVKTGLIAAAVVSSWTWAATLLQSTAMVYKVGISGGYYYGAGACFQIIAFAALAIKAKQRAPNAHTFLEIIYARYGKVAHICYLFYALATNILVTAMLLTGGSAVVNDLTGMNTVAACFLLPLGVIVYTLFGGIKATFLTDYVHTIVIIVIILTFAFTVYATGDKLGSPGKVYDLVRAAAQAHPIEGNAGGEYLTMRSKSGGIFFVINLVGNFGTVFLDNGYWNKAISASPAASLPGYVLGGVSWFAIPTLISTAMGLACVALESNPSFPTYPQRLTSDQVSAGLVLPSAAVTILGKGGAVAALLMVFMAVTSAMSAELIAVSSIFTYDIYRTYINPNATGKKLIFSSHAACIIFGFSMAGFAVGLYYAGVSMGYLYELMGIIISAAVLPACLTLFWKQQNLAAVVISPILGTGLAIMAWLVCAKSQFNEITIDSTFADDPMLTGNVVALLSPMVFIPILTYAFKPQKFNWDLLQVITRADETEEIEAAEGQTEGENGQVSVRGDTSDSGNSIEANDREKLAAVKSVTSAAQEVPETQIDAMKREEAERLEVAGKWGTYLCIFFALALLVVWPMPMYGSKYIFSKKFFRGWVVVLIIWLFLSGFCVCIYPLWEGREGIYTTCRGIYWDLTGQTYKLREWQNSHPEKLHVVQSQISARAHASRRSLDGNIDDIVN

SEQ ID NO: 51 - protein, 723 aa, Kluyveromyces_lactis
MAVMEAPLPQGAGYAVVVGLGFVFAFAMILTTYVLRRYQKEIITAEEFATAGRSVKTGLIAAAVVSSWTWAATLLQSTTMVYKVGISGGYFYAAGAGYQVILFSALAIKCKQRAPNAHTYLEIIKARYGTIGHFCYMFYALATNVLVTAMLLTGGSAVVSDLTGMHTVAACFLLPVGVVLYTIFGGIKATFLTDYVHTIVIIVIIMIFAFTVYATNSQLGSPKAVYDLVREAAKAHPIEGNAGGEYLTMRSRSGGIFFVINIVGNFGTVFLDAGYWNKAISSSPAAALPGYVLGGLSWIAIPNLISLAMGLACVALESSPNFPTYPERLTAEQVSAGLVLPTAAVTLLGKGGAVASLLLVFMAVTSAMSAELIAVSSIFTYDIYRSYLKPKATGKQLIFSSHISCIVFGLIMSGFATGLYYAGISMGYLYELMGIIISSAVIPCALSLFWDAQNLVAVVASPIIGTSLAIMSWLVCTKSLYGEITVSTTFEDDPMLTGNIVALLSPLITIPLLTYIFKPQNFDWEILKTITRADEEEELLEAEGNEVSVSDSDSVGNNQDAEKLQAVKTVITTVDEIPRETIERMAEEESQYLSRASKIAGYLAIFFAISFMVLWPMPMYGTGYIFSEKFFTGWVCVLIIWIFFTAFCVCCYPLWEGRHGIYTTVRGIYWDLSGQTYKLREWQDANPREMKAVQSQIIAKIESIRSETNKSKVRQNLDDVIER

SEQ ID NO: 52 - protein, 738 aa, Yarrowia_lipolytica
MIEAPLSQGAGYGVVLGVGLGFSMIMIFITWAMRRYQREVMSSEEFSTASRSVKTGLIAASVVSSWTWAATLLQSTSQAYKNGVSGPLWYSTGACVQVLLFATLAIELKRRAPGAHTYLEVIKMRFGPAGHIVFMCFGLATNILVTLMLLTGGSAVVKDLTGMNVVAACLLLPLGVILYTLFGGIKATFITDYLHTIILLVIILVFAFTTYANHDVLGSPGKVYDLLVARALEFPVKGNEHGSYLTMKSHDGAIFFVINIVGNFGTVFLDNGYWNKAIAASPAAALPGYVLGGLAWFAIPWLCATTMGLACLALEGTPSFPGYPARMSAEDVSAGLALPNAAVALLGKAGAGCALTMVFMAVTSAFSSELIAVSSIFTYDIYKGYINPKATGKTLIMTSHAAVVTFGFAIAGFAIGLYYIGVSMGFLYLLMGVIISSAVIPAVLTLMWGGLNFWAGVLSPPLGFCFAIITWLVTTKCEKGVINVDTAGSDLPMLAGNVVALLSPLMTIPVLTLIFGLDKFDFEKFKQITRADDSEFWKVDSIVEELGGSDEIVSIREKRANSPNKTGGSTTPEDPMEAEYGLHEPLPAAVEPPVHLEELDPAEKALLDKYAKIARIITAIMALCLLVLWPMPMYGVGYVFSKKFFTGWVVVGIIWIFFSAFLVVLYPLWESRQGIFETFRGLYWDCTGQTWKLRRWQGQTEDKQMAAHGVTRTFSHLERLDGQEVESDEGVQVTKIED

SEQ ID NO: 53 - protein, 737 aa, Yarrowia_lipolytica
MIDVPLSQGTGYGVVLGAGLGFSVVMVFITWALRRYQREVMSSEEFSTASRSVKAGLIAASVVSSWTWAATLLQSSSQAYKNGVSGPLWYATGATTQVVLFATLAIELKRRAPGAHTYLEVVKMRFGPAGHAVFMVFALMTNTLVTLMLLTGGSAVVNDLTGMHVAAACILLPLGVVLFTLFGGIKATFITDYINNIVLLIMIILFAFTTYSNHEVLGSPGKVYDLLVERALQLPVKGNEQGSYLTIKSYDGAIFFVMNIIGGFGTVFLDNGYWNKAIAASPAAALPGYVLGGLAWFAIPWLCATTMGLACLALEGTPSFPGYPGRLSAEDVNAGLTLPAAAVALLGKAGAGCALVMVFMAVTSAYSSELISVSTIFTYDIYKGYINPKATGKKLIMASHAAVVVFGVATACFAIGLYYIGVSMGFLYLLMGSIISAAVIPAVLTLLWSGLNFWAAVLSPPLGFCFAITAWLVTTKSLEGEINVETAGTNLPMLAGNVVALLTPAITIPLFTLIFGMDNYDFEKFKQITRADDSEFWKVDAVEELGGSDEVASIREKKQANAPNKSTGESSAPENGMVAEYEVDDSLSDEAPIHIEELDPAEKALLDKYAKISRIITIVMAVCLLVLWPMTMYGTGYVFSKKFFTGWVAVGFVWIFFSTIMVIIYPLWESRQGIFETLRGLYWDCTGQTWKLRRWQSQTENKQMAAHGVTRTISHIERLQGEEVESEEGVQVTKVDN

SEQ ID NO: 54 - protein, 703 aa, Pichia_angusta
MLEAPLPQGAGYAVVVGLGFVFSLGMIMTTFILRRYQKEIITAEEFVAAGRSVKTGLIAAAVVSSWTWAATLLQSCTQVYKNGFYYASGATVQIILFAFIAIKAKQRAPEAHTYLEIVKARYGTTAHAVYMFFAIATNVLVTAMLLTGGSAVISDLTGMNTVAACFLLPVGVVVYTLFGGIKATFLTDYAHTIAIIVIILTFAFTTYVSGDVLGSTSKVYDLVIEAAKEKPIEGNAEGSFLTMNSRSGGIFFVINIVGNFGTVFLDNGYWNKAIASSPAAALPGYIFGGLAWFAVPWLVSTTMGLACVALEKTPAFPSYPNLLTADEVSAGLVLPSAAVAMMGKGGAVAALIMVFMAVTSASSAEFIAVSSIFSYDIYKGYINPSASGKRLIFTSHVSVVVFSLVMSGFATGLWYAGISMGYLYELMGIIISAAVFPAAMTLLSKKQNVHAVVWSPILGTAFAIMSWLVCTKKKFGSITVSNTFEDDAMLTGNVVALLSPLIFVPILTYAFGSQEFDWEILKTIRRVDETEEIIEATEPVTEDAEFQPVKSHMTAIAHDIYEQKKATAAAEEEELLRKASKIAGYTCLFMAISLLVLWPMPMYGSKYIFSKKFFTGWVTVGIIWLFFSAFIVIIYPLWEGRHGIYVSMRGIYWDLTGQTWKLREWQNEHPEELHVVRSQVSAEIAHERAGGIDQAIERLSEKD

SEQ ID NO: 55 - protein, 686 aa, Ashbya_gossypii
MDHLNPPLSQGVGYAIVVGLGAVFAIGMVMTTYILRRYQREVITAEEFATAGRTVKTGLIASAVVSSWTWAATLLQSTTMAYKVGVSGPFYYAAGACVQIILFSTLAIKCKQRAPNAHTFLEIIKARYGRKAHILHMCYALVTNVLVTTMLLTGGSAVVSELTGMHTAAACFLLPVGVIIYTLFGGIKATFLTDYVHTVIIVGIILTFTFSVYRTSDMLGSASKVYDLLREAARQHPVKGNRNGEYLTMKSESGGIFFVVSLVGNFGTVLLDNGYFTKAFSSSPAAALPGYVVGGIVWFAIPCLVATSLGLACLALELLPSFPNYPSRLSQEQVDAGLVLPVAAFNLLGKGGAMAALLMVFMAVTSAMSAELIAVSTIFTYDIYRGYVNPDAPGKRLIVTSHAACVVFGVAMSAVSVGLYYAGISLGYLYEVMGIIISSAVIPSALTLFWSKQNIYAVTIAPLVGTTLAVTSWLVCAKVLYGSITVENTYKDYPMLTGNLVALLSPALLIPLLTYSLGADSYDWIAMKTDILRVDETDELLDADKGLAMVVTRELFESSSVPSAIEKEEINHTTEPNLQREMTNGLEEERILKRASRLATILCAIFILSFLVLWPVPMYGTGYIFSKGFFTGWVSVLTLWLFCTGFAVCIYPLWEGRHGLFTTVRGIYWDCTGQKAKLRDWQCSQI

SEQ ID NO: 56 - protein, 727 aa, Debaryomyces_hansenii
MTEVYVPLPQAAGYAVVVGLGVVFAAGMILTTFVLRRYNKEIITAEEFATAGRSVKKSLISAAVVSSWTWAATLLTSTTQTYNNGISGSFYYAAGATCQIVLFACLAIKAKERAPGAHTYLEIVKARYGSGAHGVMLFFGLATNVLVTAMLLSGGSAVVSDLTGMNTVAACLLLPLGVVVYTLFGGIKATFLTDYAHTVVIIVIIMVFSFSAFATSDKLGSPAVVWEAVTKLAETQPREGNAGGSYLTMHSRSGGIFFVINIVGNFGTVFLDNGYFNKAFAADPSATLPGYVLGGLAWFAIPMLTSTCLGLVGLSLENTEYWPTYPNKLTPEQVSAGLVLPNAAVALLGKGGAVCSLLLVFMAVTSAMSAELIAVSTIFTYDIFRTYVDPKASGKKLIFMSHMSVIAFAYVMAGFAIGLYYAGISMGYLYELMGIIIGGAVLPSTLTLLSRKQNKQAVIFTPILATGFAIFSWLLCTKMKFKTVTVDTTFEDDSMLTGNVVALLSPLVFIPIFTYAFKPQNFDWNILKEIKRVDEEEEIAEATEGKHTNSGDFENVHPAKSQISIVASELAELKTDQIEIESKMLNKSFKKAVIICISLTLSLVILWPMPMYGSSYVFSKKFFTGWVVVLIIWIFFSAFLVVVCPLWEGREGIYITMRGIYWDCTGQTYKLREWQNSNPEKLHSVNSQISAHVLNFNQIHIVDGKTLDDGYRTPRQIDDIIDDTKKE

SEQ ID NO: 57 - protein, 721 aa, Clavispora_lusitaniae
MSSAAYIPLPQGAGFAVVVGLGAVFAAGMVLTTFCLKRYNKEIMTAEEFSTAGRSVKTFLLSAAVVSSWTWAATLLTSTVQVYNNGVSGALYYAAGASVQIILFACLAIKGKERAPSAHTYLEIIKTRYGSITHGIYCFWGFATNVLVTAMLLTGGSAVVHDLTGMNVVAACLLLPLGVVVYTLFGGIKATFLTDYAHTVVIVVIMLVFGFNAFAISDKLGSPSAVWEAVTKLALTQPRSGNAGGSYLTIKSHSGGIFFVINIVGNFGTVFLDNGYFNKAFASDPAATLPGYVIGGLAWFAIPMFVATTMGLTALSLQDTPAWPTYPNKMTPAEVSAGLVLPNAAVALLGKSGAVMSLLLVFMAVTSAMSAELIAVSSIFTYDIYRTYVEPKASGKKLMLMSHASVIVFAYVMAGFAIGLYYAGISMGYLYELMGVIIGGAVLPSALTLLSSRQNWAAATYTPPVATALAIMSWLVCTKKKFGSISVDTTFMDDAMLTGNVVALLSPMIIIVVLTLAFGPQNFDWNLLKTITRVDEEEELLEAEGEQTDPEKLAPVRSQITQVAHEIAIDQAEKYAAESARLNHAFKIAITICCVLAVCLILLWPIPMYGTGYIFSRHFFTGWIVVLFIWSFFTAFVVIIGPLWEGREGIATTVRGIYWDLSGQTHKLRAWQNDHPEKLHAVQSQVSAELTRITSVDGRVVEGGYLTPHHIDVELEDAKKD

SEQ ID NO: 58 - protein, 724 aa, Scheffersomyces_stipitis
MSLLAVTLDQGAGYGVVVGIGALFAFGMIFTTYVLRRYNKEIITAEEFATAGRSIKTGLIAAAVVSSWTWAATLLTSTTMVYNNGISGGFFYAAGATCQITLFACLAIKGKERAPGAHTYLEIVKARYGTTCHLVYVFWGLATNILVTAMLLTGGSAVVNDLTGMHVVAAILLLPLGVVAYTLFGGLKATFLTDYAHTVIMVVIILIFAFTTWATSDVLGSPGAVWEAVTALAETQPRDGNAGGSYLTLHSRSGGIFFVINIVGNFGTVFLDNGYFNKAFAANPGAALPGYVLGSLAWFAIPCFTSLTMGLAALALEGTDAWPTDHKMTPQEVSAGLVLPNAAVALLGKGGAACSLLMVFMACTSAMSAELIATSSIFTYDIYRTYINPEATGKKLIWVSHISVIGYAYVMAGFAIGLYYAGVSMGYLYELMGIIIGGAVLSSALCLLSKRQNVQAAIFTPPIATALAIMSWLVCTKKMYGSINLTTTFMDDPMLTGNVVALCSPLIFVPLLTIIFKPQNFDWQILKSIRRVDEEEEILEAEHVAVDHEKVHPVKSQVSVIASELVDLEKDKYAEEELMLHNSFKKAVIICVGLTLCLLILWPMPMYGTSYIFSKRFFTGWVVVMFIWIFFTVGMVIIYPIYEGRFALYNTFRGMYWDLTGQTWKLRAWQQEHPEKMHAVVSQVSNQILAATQSQIYEGKTVFNGAITPRNIDDEISDLKKDSN

SEQ ID NO: 59 - protein, 682 aa, Tuber_melanosporum
MSSPPLSQGFGYGIVLGLGFAFALGMIGTTWALKRYQNEVQTSEMFSTAGRTVRTGLVASAVVSSWTWAATLLQSSGIAYQYGVSGPFWYASGATVQILLFATLAIELKRKAPNAHTFLEVIRARYGAATHVTYMVFGLFTNILVTAMLLTGGSAVVNSLTGMPTAAACFLLPVGVVLYTLFGGIKATFLTDYIHTVVILVVILIFAFTTYATSDILGSPSKVYDLLVEASARHPVAGNAGGSYLTMRSKEGAIFFIINIVGNFGTVFLDNGYYNKAIAASPVSALPGYVLGGLSWFAIPWLAATTMGLACLALENHPSFPTFPDRMPDADVKAGLVLPNAAVAMLGQGGAACTLLLIFMAVTSASSAELIAVSSIFTYDLYQTYFNPSATGKKLIIMSHTMVVVFGVLMAAFSTGLYYAGVSMGYLYLLMGVIVSSAVLPASLTLLWKGQNKWAAMLSPILGLACSLVAWLVTTKKQFGEITVSSSGSNDPMLAGNVVALLSPLIFIPILTLIFGIDNYDYESMRAIRKGDDHDIAAEAHIDLELIPGERAGSNGSETEEVEQKKLEKAAKIARITTVVMTLILLVLWPFPLYGTSYIFSKKFFTGWVSVGIIWLFFSMLCVGVYPLWEGRHAMAHTTKSIWLDITGQRRPPIQGRMADVEDEKHTKELDEKKLPGGATST

SEQ ID NO: 60 - protein, 726 aa, Candida_tropicalis
MSDHIAPLPQGAGYAVVVGLGFVFAIGMVGTTYALKRYNKEIMTAEEFATAGRSVKTGLIASAVVSSWTWSATLLTSTSQVFRNGIAGSIFYGAGATAQITLFACLAIKARERAPAAHTYLEIVKGRYGTITHCVYIFWGFCTNILVTVMLLAGGSATVNDLTGMHPVAACLLLPLGVVIYTLFGGIKATFLTDYAHTAVLIIIIMIFGFLTWATSDKLGSPNAVWELVTAYAEANPREGNSQGSFLTMRSHSGGIFFVINIIGNFGTVFLDNGYFNKAFAADPVSSYKGYILGSLAWLPVPAFTSLTMGLAALALQNTEYWPFGRAMTDAEVAAGLVLPNAASALLGQGGAVLALLMVFMAVTSAMSAELIAVSTITTYDIYRTYVNPNATGKKLIWYSHLSVIIFAYSMAGFAIGLYYAEVSMGYLYEMMGVIIGGAVLSSALTILSKRQNWHAATFTPIISTSLAIMAWLVCTKKQEGSVTYLKTFMDNPMLTGNCVALLSPLVIIPVLTFAFKPQNFDWKLLDSRITRVDEEEELADALGEVNSNDPERLSPIKSQISVIASQLVDGEREKYAEERATLKKAFKFCCIVCVTITICLLVLFPMPMYGTGYVFSKRFFTGWVSVFFIWLWYSAFQVIVYPIYEGRHELYHTFRGIYWDLTGQTYKLRAWQNEHPEEMHAVRSQLQAQLSGTAISHDVVDGKALGDGYTTPANIDAALDDEKKE

SEQ ID NO: 61 - protein, 675 aa, Penicillium_marneffei
MAEAHFTAPLSQGFGYGIVVGLGFAFALLMIFITWALKRYQHEVQTSEMFSTAGRTVKSGLVASAVVSSWTWAATLLQSSTVAYEYGVSGPFYYAAGATVQILLFATLAIELKRRAPNAHTFLEVIRARYGTVVHCVFIVFCLMTNVLVTAMLLTGGSAVLNALTGMPTPAACFLLPIGVVLYTVFGGIKATFITDYLHTIVIVVIIFTFAFNTYAVSPILGSPGKVYDILTAAAKANPVDGNSGGSYLTMHSREGGIFFVINLVGNFGTVFLDNGYYNKAIAASPVHAFPGYVIGGLCWFAIPWLCATTMGLAALALQGNAILSPTDVTAGLVLPYAAVEMMGYGGAVATTLMVFMAVTSAFSAQLIAVSSVCTYDIFQAYIQPSAKGKKLVWISHMACVVYALVMAGFATGLYYAGVGMGYLYLLMGVIISSAVLPGALTLLWKGQNWVAAALSPPLGLACALIAWLVTAKSLYGELTVTTTGSNYPMLAGNVVALLSPVIFIPILTLIFGQQNYDYESMRSIRKVDDSDVAAEAHVDLELIPGETTNFAQDMTEEETHKLNRAAFYARALTVIMTLCLLILWPMPMYGSGYVFSKKFFTGWVVVGIIWLFGTAFGVVIFPLYEGRDSIVYTVKAMWLDATGKKKPVNAIHAAVEREEESGQATPEEKLPVKT

SEQ ID NO: 62 - protein, 708 aa, Pichia_pastoris
MAGGIETPLPQGAGYAVVLGLGFFFSFLMIGITYGLQRYKKEIMTSEEFNTGGRSIGTGLIASAVVSSWTWAATLLTSSTMAYNFGVSGSFFYAAGACVQIVLFSYLAIKAKQRAPECHTYLEIVKARYGTLTHCVFMFFAIATNVLVTAMLLTGTSAVISDLTGMHTVAVCFLMPISVVAYTIVGGLKSTILSDYSHNGALLIIILVFAFTTYAGSDKIGSPTRLWEMVNARSALNPVEGNAGGNYFTMSSRGGGIFFVINIAGNFGTVFLDNGYWNKAIAASPAAAMPGYVLAGFHWFSIPFLCATTMGLACLALEDLNDPLTPQQVSAGLVLPTAATQLLGKGGAVASLLLVFMAATSALSSELISVSSIFTYDIFKGYLRPRASGKTLLVTSHLSVMAFAMIMSAFSTGLWYAEISMGYLYELMGILISAAVVPASCTLLWKDQNKVAATLSPPLGCALAITGWLVYSKVNFGEVTVDTTFEDMSMLTGNCVALLSPLLFVPLFSFIFGFQNFDWRVLKSINRVDEDEEIIEKTEPNVHIDAETGMYPIKSQITNAAEEIALKTGDERLTAEEAQLKRSSRIAGFACLVSASSFLILWPMPMYGSRYIFSSQFFTGWVTVGIIWVFSTIGLVLLLPIWEGRHTLYTTFRGIYWDLSGNSHKLKEWQESHPEELHVVQSQISAQVQRHNRIQVIDDLVETDSDRK

SEQ ID NO: 63 - protein, 676 aa, Pyrenophora_tritici-repentis
MSTTPPLSQGFGYGIVIGLGFAFSFGMILTTFVLKRYNYELQTSEMFSTAGRTVKSGLVASAVVSSWTWAATLLQSSAVAYRYGVSGPFWYASGATVQIILFATIAIELKRRAPNAHTFLEVIRARYGTVTHIVFMVFGLFTNILVTSMLLTGGSAVVTSLTGMPTAAACFLLPVGVVLYTMFGGIKATFLTDYAHTVVILVILLMFAFTAYATNEHLGSPGKVFDLLVQAAADHPVEGNAGGSYMTMRSKEGAIFFVINIVGNFGTVFCDNGYYNKAIAASPVDALPGYIIGGLSWFAIPWLAATTMGLSALALESNPVFPGYPNRMADADVTAGLVLPTAAVALMGSGGAAAVLLLVFMAVTSAMSAELIAVSSIFTYDFYQTYINPAATGRQLIYMSHTMVVGFAVAMAAWSTGLFYIGISMGYLYLLMGVIISSAVLPATLTLMWSKMNWAAATFTPPLGFACSLIAWLVTAQKESGELTVASTGANNPMLAGNVVALLSPLIFVPMLTYSFGPQNYDWVSMKAIRKGDDHDLALAANVDLERVPGEQRRAIDAEEEEQAKLLKASRIARWLTLFMAVSFLVLWPMPMYGSSYIFSKKFFTGWVVIGILWMFCSCFAVGLYPLWEGRKTSVRTFKSIYWDITGKKKPNKAMEVTEGEGTDTPPEAVSEKMKG

SEQ ID NO: 64 - protein, 676 aa, Talaromyces_stipitatus
MAEAHFTAPLSQGFGYGIVVGLGFAFALLMIFITWALKRYQHEVQTSEMFSTAGRTVKSGLVASAVVSSWTWAATLLQSSTVAYEYGVSGPFYYAAGATVQILLFATLAIELKRRAPNAHTFLEVIRARYGTVVHCVFIVFCLMTNILVTAMLLTGGSAVLNALTGMSTPAACFLLPIGVVLYTVFGGIKATFITDYLHTIVIVVIIFTFAFNTYAVSPTLGSPGKVYDILTAAAKARPVDGNSGGSYLTMHSREGGIFFVINLVGNFGTVFLDNGYYNKAIAASPVHAFPGYVIGGLCWFAIPWLCATTMGLTALALQGDALLSSTDVTAGLVLPYAAVQMMGYGGAVATTLMVFMAVTSAFSAQLIAVSSVFTYDIFQAYIQPSAKGKRLVWISHMACVVYALIMAGFATGLYYAGVGMGYLYLLMGVIISSAVIPGSLSLLWNGQNWVAAAVSPPLGLACALIAWLVTTKSLYGEMNVTTTGSNYPMLAGNVVALLSPLIFIPILTLIFGQQNYDYESMRNIRKVDDSDVAADAHVDLELIPGETTNAQDMTEEETRKLNRAAFYARTLTVIMTLCLLILWPMPMYGSGYVFSKKFFTGWVVVGIIWLFCTAFGVVIFPLYEGRNSIVYTVRAMWLDATGKKKPVNAIHVDREESGGTSRASPTPDEKLSVKT

SEQ ID NO: 65 - protein, 680 aa, Aspergillus_niger
MSSDTVTFTAPLSQGFGYGIIIGLGFAFALLMIFITWALKRYQNEVQTSEMFSTAGRSVKSGLVAAAVVSSWTWAATLLQSTTVAYEYGISGPFFYASGATVQIILFATLAIELKRRAPNAHTFLEALRARYGTVVHVVFIVFCLMTNILVTAMLLTGGSAVLTSLTGVNTVAACFLLPIGVVLYTLFGGIKATFITDYLHTVVIIVVIFIFAFSAYATSDKLGSPGAVYDALVAASKLHPVDGNAEGSYLTMRSKEGGIFWIINLVGNFGTVFLDNGYYNKAIAASPVHAFPGYVIGGLCWFAIPWLCASTLGMTALSLEGTQRLSPDDVTAGLVLPFAAVKLLGYSGAVCTTIMIFMAVTSAFSAQLIAVSSIFTYDIYQAYIDPSAKGKRLVWVSHMTCVFWAIAMAGFSTGLYYAGIGMGYLYLLMGVIISSAVFPGAMSLIWKHQNWIAAAASPPLGLAVSFIAWLVTTKKQYGILTVTTTGANYPMLAGNVAALLSPVIFSPILTLIFGSQNYDYGTMRAIRRVDDADVAAAAHIDIELIPGEINTQSAAQEEEETRKLNRAALYSRTLTIFMVLCFLILWPIPMYGSSYVFSKKFFTGWVVVGLIWLFCTTFGVVIFPLYEGRESIVRTVRMMALDIMGKRGRRKGMIVGEMTSGDVSGVQTPVPEKKEVLEK

SEQ ID NO: 66 - protein, 709 aa, Candida_tropicalis
MSDNITPLPQGAGYAVVVGLGFFFAVGMVATTFALKRYNKEVMTAEEFATAGRSVKTGLIAAAVVSSWTWSATLLTSTSQVFRNGVSGSIFYAAGATAQITLFACLAIKARERAPAAHTYLEIVKGRYGTITHCVYIFWGFCTNILVTVMLLAGGSATVNDLTGVHPVAACLLIPLGVVVYTLFGGLKATILTDYAHNVVMIVVIMIFGFVTWATSSKLGSPGAVWDLVTAYAETNPREGNSQGSYLTLRSRSGGMFFVINIIGNFGTVFLDNGYFNKAFSANPVSSYKGYILGSLAWLPVPAFTSLTMGLAALALQNTEYWPSGRGGITDAEVAAGLVLPNAASALLGQAGAVLALIMVFMAVTSAMSSELIAVSTIATYDIYRTYVNPNATGKKLIWYSHVSVIIFAYSMAGFAIGLYYAKVAMGYLYEMMGVIIGGAVLSSTLTILSKKQNWHAATFTPIISTSLAIMAWLVCTKTQEGSVNYLNTFLDDPMLTGNCVALLSPLVIIPVLTFAFKPQNFDWSLLDSRITRVDENEELADALGEVNSSDPERLSPIKSQISVIASQLVEGERERYAEERATLKKAFKLCVIICVTITICLLVLFPMPMYGTGYVFSKKFFTGWVAVFFLWLWYSTFQIVVFPIYEGRHELYHTFRGIYWDLTGQTYKLRAWQNEHPEEMHAVRSQLQAQLSGTATSHVVVDGKAFRR

SEQ ID NO: 67 - protein, 725 aa, Candida_albicans
MADSYVPLPQSAGYAVVVGLGFVFAFGMMLTTYILRRYNKEVMTAEEFATAGRSVKTGLIAACIVSSWTWSATLNGSTSQVYNNGVCGSIFYAMGATVQITLFACLAIKARERAPAAHTYLEIVKGRYGTTTHFVYIFWGIVTNILVTSMLLSGGSATVNDLTGMNIVAAILLLPLGVVIYTLFGGIKATFLTDYAHTVVLIVIIFIFAFTTWATSSKLGSPQAVWEIVTKLAESNPREGNAGGSYFTMHSRSGGMFFVINIIGNFGTVFLDNGYFNKAFAANPSSTYKGYIFGSLAWCAIPALCSLTMGFAALALEHTEYWPLGRPMTAAEVASGLVLPNAASALLGKAGAVLALLMVFMAVTSAMSAELIAVSTIATYDIYRTYINPNASGKKLIWVSHLSTVIFAYTMAGFAIGLYYAKVSMGYLYEMMGVIIGGAVLSSALTILSKRQNWHAATFTPIISTALAIMAWLVCTKKKFGSVTYLKTFEDDAMLTGNCVALLTPFIIVPILTFIFKPQNFDWKLLDQRITRVDEEEELAEALGGTVSSDPERLHPIKSQISVIASQLVEGEREQYQKEKEILNKSFKICCIVCCTLAICLVVLFPMPLYGTKYIFSKKFFTGWVVVFIIWLFYSAFQVIIFPIWESRTDLYHTFRGIYWDLTGQTYKLKAWQNEHPEEMHAVRSQLQAQLSRTAVTHEIVDGKAFGDGYVTPANIDDALEEKKG

SEQ ID NO: 68 - protein, 686 aa, Penicillium_chrysogenum
MSSDGVIFTAPLSPSFGYGIILGLGFAFSLLMIFITWALKRYQNEVQTSEMFSTAGRSVKSGLVAAAVVSSWTWAATLLQSSAVAYQYGVSGPFFYASGACVQILLFATLAIELKRRAPNAHTFLEVIRARYGTVVHVVFIVFCLMTNILVTAMLLTGGAAVMTSLTGVPTAAACFLLPIGVVLYTLFGGIKATFITDYLHTVVILVVIFLFAFSAYATNAELGSPSKVYDALVAASQRHPVEGNAEGSYLTMRSKEGGIFWIINLVGNFGTVFLDNGYYNKAIAASPVHAFPGYVIGGICWFAIPWLCASTMGLSALALEGTQRLSSGDVTAGLVLPFAAVKLLGYSGAVATTLMIFMAVTSAFSAQLIAVSSIFTYDIYAAYIDPSAKGKRLVWISHMSCIVYSIIMAGFATGLYYAGIGMGYLYLLMGVIISSAVFPGAMTLLWKGQNRIAAAVSPPLGLAVSLIAWLVTAKKQYGILTVDTTGANYPMLAGNVAALLSPVIFVPLFTYVFGPQNYDYESMRAIRKVDDTEVAAAAHIDLELVPGEMGPTQDESEEETRQLNRSALYARTLTVFMAFSFLILWPIPMYGSSYVFSKKFFTGWVVVGIIWLFFTTFGVVVFPLYEGRASIVRVVRMMSLDLVGKKPKVYRGTKAGADDVATPSGVATPTEMLGEKDKQTSEREV

SEQ ID NO: 69 - protein, 679 aa, Aspergillus_clavatus
MSSSDAKFVAPLSQGFGYGIIIGLGFAFALVMIFITWALKRYQHEVQTSEMFSTAGRSVKSGLVAAAVVSSWTWAATLLQSSAVAYQYGVSGPFFYASGACVQIILFATLAIELKRRAPNAHTFLEVIRARYGTIVHLVFIVFCLMTNILVTAMLLTGGSAVMTSLTGVPTAAACFLLPIGVVLYTLFGGIKATFITDYMHTVVIIVVIFIYAFSAYATNSELGSPSKVYDALVAASERHPVEGNAQGSYLTMRSKEGGIFWVINLVGNFGTVFLDNGYYNKAIAASPVHAFPGYVIGGLCWFAIPWLCATTMGISALALEGTQRISPDDVTAGLVLPFAAVKLLGHSGAVCTTLMVFMAVTSAFSAQLIAVSSIVTYDVYQAYINPAAKGKRLVWVSHVSCIIFAIIMAAFATGLYYAGIGMGYLYLLMGVIISSAVFPGAMTLVWKDQNWIAAASSPVLGLAVSLIAWLVTAKKEYGELTVASTGSNYPMLAGNVAALLSPIIFSPVLTYAFGTQKYDYESMRAIRKVDDTDVAAAAHVDIELIPGEVTVHNAEAEAEEERKLNKAAFYSRTLTIAMVICFLLLWPIPMYGSSYVFSKKFFTGWVVVGLIWLFCTTFGVVIFPLWEGRESIIRTVRLMALDAQGRRPALVGQASKESEDTPSGAATPTEKMPTKSDA

SEQ ID NO: 70 - protein, 679 aa, Neosartorya_fischeri
MSSEEVKFVAPLSQGFGYGIIIGLGFAFALVMIFITWALRRYQHEVQTSEMFSTAGRSVKSGLVAAAVVSSWTWAATLLQSSAVAYQYGVSGPFFYASGACVQIILFATLAIELKRRAPNAHTFLEALRARYGTAVHLVFIVFCLMTNILVTAMLLTGGSAVLTSLTGVHTAAACFLLPIGVVLYTLFGGIKATFITDYMHTVVIIVVIFIFAFSAYATNAELGSPGKVYDALVAASELHPVEGNAQGSYLTMRSKEGGIFWVINLVGNFGTVFLDNGYYNKAIAASPVHAFPGYVIGGLCWFAIPWLCATTMGISALALEGAQRISSDDVTAGLVLPFAAVRLLGYSGAVCTTLMVFMAVTSAFSAQLIAVSSIVTYDVYQAYINPAAKGKRLVWVSHMSCIAFALIMAAFATGLYYAGIGMGYLYLLMGVIISSAVFPGAMTLVWKQQNWIAAACSPVLGLAVSLIAWLVTAKKEYGELTVASTGANYPMLAGNVAALLSPIIFSPVLTYLFGTQNYDYESMRSIRKVDDTDVAAAAHVDIELIPGELDVRDAQAEEEEQRKLNRAALYSRTLTVGMVICFLLLWPLPMFGTSYIFSKKFFTGWVVVGLIWLFCTTFGVVIFPLWEGRQSIKRVVRLMALDLTGKRPALVGQKSRVHEDNSSGVATPTEKMEPKTSI

SEQ ID NO: 71 - protein, 693 aa, Aspergillus_nidulans
MVAVIAAPDEAGVETVTFTAPLTQGFGYGIIIGLGFAFALVMIFITWSLKRYQHEIITSEMFSTAGRSVKSGLVASAVVSSWTWAATLLQSSAVAYQYGTSGPFFYASGATVQIILFATLAIELKRRAPNAHTFLEAIRARYGTVVHLVFIVFCLMTNILVTAMLLTGGAAVLNSMTGVPVVAACFLLPIGVVLYTLFGGIKATFITDYMHTVVIVVIIFIFAFSAYASNDRLGSPGKVYDLLVQAALRNPVSGNAEGSYLTMRSKDGGIFWVINLVGNFGTVFLDNGYYNKAIAAHPVHAFPGYVIGGLCWFAIPWLCATTMGLSALALEGTRRIASVDVTAGLVLPFASVELLGYSGAVCTTLMIFMAVTSAFSAQLIAVSSILTYDIYQAYINPAAKGKRLVWVSHLSCVVFAIAMAAFATGLHYAGIGMGYLYLLMGVIISSAVFPGAMTLVWKGQNWIAAAASPVLGLAMSLVAWLVTTKTEYGVFTVETTGANYPMLAGNVAALLSPVVFSPVLTYLFGPQNYDYESMRAIRKVDDSDVAAAAHVDLELIPGASNTNSSPSQQQQEEEEIRKLNKAAFISRCLTVGMVICFLILWPIPMYGSGYVFSKKFFTGWVVVGIIWLFGTAFGVILFPLWEGRSSIKRVGKLMLLDAMGRQWKSSALVGQGDEESEESGSGAVTPSEKIVAK

SEQ ID NO: 72 - protein, 725 aa, Lodderomyces_elongisporus
MGAEFVPLPQSAGYAVVVGLGAVFAFGMMLTTYLLRRYNKEIITAEEFATAGRSVKSGLISAAVVSSWTWAATLLTSTTQVYKNGIFGSCSYAFGATVQITLFASLAIKAKERAPLARTYLEIVRARYGKTTHMIYIFWGFATNILVTAMLLTGGSATITDLTGMHPVAACLLVGLSPTVYSVFGGLKATILTDYAHTVIMVVVIIIFAFSTWATNHKLGSPSVVWELITELGKTRPVEGNAEGSYLTFHSRSGGIFFVINIVGNFGTVFLDNGYFNKAFAADPKSAYKGYILGSLAWLPIPAFCSLTLGFAALALEQTEYWPLGRAMTADEVALGLVLPNASAALLGKGGAVLSLIMVYMAVTSAMSSELIAVSTICTYDIYRTYINPQATGKKLIWISHLSCAAFAYIMAGFAIGLYYANVSMGFLYELMGIIIGGAVLSSAMTILSSKQNWYAATFTPPIATALAIMSWLVCCKTKFGAVNYDNLFEDDAMLTGNVVALLFPLITVPLFTLIFKPQHFDWKLLETRITRVDEEEELIEATKSDSQEEDPEKLEPVRSQISMIASDIAQQEQVRQRYSEEQVQLRKAFKTCVIVCVSLTLALLVVWPMPMYGSKYIFSRHFFIGWVVVFFIWIWYTVFQVIVYPIWEGRSSLASTARGIYWDCTGQTYKLRAWQNSHPEDMHAVRSQIQAQLSASRSAPMVVDGRAVQTDMANIDDAMSDEKK

SEQ ID NO: 73 - protein, 679 aa, Aspergillus_terreus
MAEEVKFVAPLSQGFGYGIIIGLGFAFALVMIFITWALKRYQHEVITSEMFSTAGRSVKSGLVAAAVVSSWTWAATLLQSSAVAYQYGISGPFFYASGATVQIILFATLAIELKRRAPNAHTFLEALRARYGTPVHIVFIVFCLMTNILVTAMLLTGGSAVLTSLTGVNTVAACFLLPIGVVLYTIFGGIKATFITDYMHTVVIIVVILIYAFSAYATNRVLGSPSRVYDALVAAADRFPVEGNAQGSYLTMRSKEGGIFWVINLVGNFGTVFLDNGYYNKAIAAHPVHAFPGYVIGGLCWFAIPWLCASTMGISALALEGTRRMSQSDVTAGLVLPFAAVELLGYSGAVCTTLMIFMAVTSAFSAQLIAVSSIFTYDIYQAYINPSAKGKRLVWISHMSCGIFAVCMAAFATGLYYAGIGMGYLYLLMGVIISSAVFPGAMTLVWKGQNRVAAAASPVLGLAMSLIAWLVTAKKEYGVLTVTTTGANYPMLAGNVAALLSPLVFSPVLTYAFGPQNYDFESMRAIRKVDDTDVAAAAHVDIELIPGEAPAITDAAAAAEEERKLNRAALYSRTLTIGMVFCFLILWPIPMYGSSYVFSKKFFTGWVVVGIIWMFFTAFGVVIFPLYEGRESIVRTVRLMALDAMGRKPRKIHGQKEDGGPDEMTSGVATPTEKVGVKE

SEQ ID NO: 74 - protein, 643 aa, Botryotinia_fuckeliana
MPISPPLSSGWGYGIVLGLGALFAFGMILVTWILKRYNHELQTSEMFSTAGRTVKSGLVASAVVSSWTWAATLLQSSGVAYKYGVSGPFWYASGATVQILLFATIAIELKRRAPNAHTFLEVIKARYGVHAHIVFTVFGLMTNILVTAMLLTGGAAVVSSLTGMPTPAACFLLPLGVVMYTMFGGIKATFLTDWVHTFMLLIIILIFAFTTYATSEVLGSPKAVFDLLLKAAADHPVEGNSGGSYLTMKSSEGAIFFVINIVGNFGTVFLDNGYYNKAIAASPVHALPGYIMGGISWFAIPWLCATTMGLAAIALEGNPVFPTYPNRMDAADVSAGLVLPYAAVAILGSGGAVCTLLIVFMAVTSASSAELIAVSSIFTYDIYQTYFNPKASGKRLIYMSHAMVIGFGLFMAAFSTGLYYAGISMGYLYLMMGVIISSAVIPATLTIMWAGHNRWAATLTPPLGLVCALIAWLVTAKKECGSLDVDCTGSNNPMLAGNVTALLSPLIFTPLFTLIFGWDKYDWKSMSDIRRGDDHDLADAADIDLELVPGEMSASAAEEELEQTKLLRASKIAKSMTVILTVSLLILWPMPMYGSGYIFSEKFFTGWVVVEGVKDDGTETPAILGSEKENRRKRVRLPLSRSS

SEQ ID NO: 75 - protein, 674 aa, Gibberella_zeae
MAGGGGPSSGTVEPPLSQAYGYGIVLGIGFLFALGMIFTTYVLKKYNHEKQTSEMFNTAGRTVKSGLVASAVVSSWTWAATLLQSSGVAYRYGVSGPFWYASGATVQIILFATIAIELKRRAPNAHTFLEVIRARYGRITHCVYICFCLFTNILVTAMLLTGGSAVVTSLTGMHTAAACFLLPLGVVIYTMFGGIKATFLTDYVHTVIILVIILIFALTAYATGTELGSPSAVYDALSKAAKNHPVEGNAEGSYLTMRSREGIIFFVINIVGNFGTVFCDNGYYNKAIAAHPVAALPGYIIGGLSWFAIPWLCATTMGLSALALETSPSFPSYPNRMDPADVSAGLVLPYAAVALLGKSGAIITLIMIFMAVTSAASAQLISVSSIFTYDIYQTYVNPQASGKRLIAISHTTVVMYGLIMASFSVGLHYIGISMGWLYVWMGVMISAAVIPATLTLLWSRQNWIAAAVSPILGLVCALIAWTVTCSREFDGVLSVDNLGSNNPMLAGNVVALLSPVIFVPVLTFGFGADKYDWASMASIKQADDATDSNGDSETAVATSFAVAPEEDMAKLNKASKIAKTMTVCMTVALLILWPMPMYGSGYVFSKPFFTGWVTVGIIWLFGSSIAVGLFPLWEGRQSIVRVTKGMFGMGGKHDTEEIQGQSVKEEKIEEFDKQ

SEQ ID NO: 76 - protein, 680 aa, Nectria_haematococca
MAGGGGPSSGTVEPPLSQAYGYGIIVGLGFLFSLGMILTTWILKRYNNEQQTSEMFNTAGRTVKSGLVASAVVSSWTWAATLLQSSGVAYRYGVSGPFWYASGATVQIILFATIAIELKRRAPNAHTFLEVIRARYGRLTHCVYICFGLFTNILVTAMLLTGGSAVVTSLTGMHTAAACFLLPLGVVLYTMFGGIKATFLTDYVHTVVILVIILIFALTAYAGGTELGSPGEVYKLLVEAAASHPVEGNAGGSYLTMRSREGIIFFVINIVGNFGTVFMDNGYYNKAIAAHPVSALPGYIIGGLSWFAIPWLCATTMGLSALALETNPAFPTYPNRMDPADVSAGLVLPYAAVGLLGKSGAICTLIMIFMAVTSATSAQLIAVSSIFTYDVYQTYINPRASGNRLIAVSHSSVIAYGTIMAGFSVGLHYAGISMGWLYLWMGVMISAAVIPATLTLLWTRQNWIAAACSPVLGLVCALIAWTVTCAKEFDGVLSVDNLGTNNPMLAGNVVALLSPIIFVPFFTFVFGADRYDWSSMAAIKQIEDSNSSDMMEDSENASPPATFTLVVPEEDKAKLNKASKTAKIMTVCMTLALLVLWPMPMYGSSYVFSKEFFTGWVVVGIIWLCGSSIAVGLFPLWEGRHSMLRVAKGMLGKSTKFEDDPAIEGKVVDDETIKDLDQKD

SEQ ID NO: 77 - protein, 684 aa, Grosmannia_clavigera
MVVPSLDQGVGYGVVLGLGIAFALGMILVTFILRRYNSELQTSEMFTTAGRTVKSGLVGSAVVSSWTWAATLLQSTAVCYRYGVSGPFWYASGATVQILLFATLAIELKRRAPNAHTFLEIIRARYGSIAHMVFLVFGLATNILVSLMLIIGGSATINALTGMHTIAAIYLLPVGVVAYTLVGGLKATILTDWVHTVILLIIIIVFALTTYASSDMLGSPSKVYDLLVEAAASHPVSGNKDGSYLTMRSREGGIFFVINIAGNFATVFNDNGYWNKAIAASPVHALPGYLIGGLSWFAIPWLAATTMGLAALALESNPNFPTFPLRMSEAEVSSGLVLPYAAVALLGKGGAAATLLIVFMAVTSATSSELIAVSSICTYDLYRTYINPAASGRSLVWMSHCIVCAYALFIASFSVGLWYAGISMGYLYLMMGVVVSSAVLPLTLTLTWSGQNKWAASLTPIFGLAFALIAWLVTAKQECGSLDVDCTGSNNPMLAGNVVALLSPLILVPIFTLIFGVDHYDWQSMLAIRRGDDHDLAASAGVDLENTLGGQEETDTEFAQELVKLRRASKISRCSTAFLTIAFLVLWPMPMYGSGYIFSKPFFTGWVTVGIIWIFCSLAAVGIFPVFEGRRTLAYTFKCIALDLTGKGRGKAIQAERETAAVAVTGDVTPTEKKDSSKEETVVM

SEQ ID NO: 78 - protein, 704 aa, Neurospora_crassa
MAGGADTTVKIETATALNQGVGYGIVIGLGALFALGMIFVTFILKRYNRELQTSEMFNTAGRTVKSGLVGSAVVSSWTWAATLLQSSGVCYRYGVSGPLWYASGATVQILLFATLAIELKRRAPNAHTYLEVIRARFGTLPHIVFMIFGLMTNILVSLMLIVGGSATINALTGMHTIAAIYLLPVGVVAYTLVGGLKATILTDWIHTFILLIIIIVFALSAYASSEVLGSPSAVYDLLVKAAAAHPVDGNHEGSYLTMRSREGAIFFVINIVGNFGTVFLDNGYYNKAIAASPVHALPGYILGGLCWFAIPWLTATTMGLSGLALESSPRFPTYPNRMPEADVSAGLVLPYAAVALLGKGGAAATLLIVFMAVTSATSSQLIAVSSIIVYDLYRTYIKPEASGKRLIYMSHVIVCAYALFIASFSVGLWYAGISMGYLYVMMGVIISSAVLPAALVLTWSGLNKWAAALSPVLGLCVALVAWLVTAKKECGEMSVACTGSNMPMLAGNVAALLSPVVFVPVLTLVFGKAKYDWKSMMAISRGDDHDVAGEAGVDLEEVPGGREESEREMEEEQKKLRRASKISKTMTAVLTLALLILWPMPLYGTGYIFSKPFFTGWVVVGIIWIFLSFIGVGLFPIYEGRETLIRTCKYIWWDITGKGVKAIHADQAKHAGEVVVTEGKTPGDQTPEEKSVKGEKVREGIDSS

SEQ ID NO: 79 - protein, 692 aa, Podospora_anserina
MDHAPADQEHIANATLGQGAGYGVVLGLGGAFAIGMIATTFILKRYNRELQTSEMFNTAGRTVKSGLVAAAVVSSWTWAATLLQSTGVCYRYGVSGPFWYASGATVQIILFATLAIELKRRAPNAHTYLEVIKARYGTVAHLVFMVFGVITNILVSLMLIVGGSATLNALTGMHTIAAIYLLPLGVIAYTMVGGLKATILTDWAHTFILLLIIIIFALTAYASHDLLGSPSAVYDLLVEAATRHPVDGNKEGSYLTMQSREGAIFFVINIVGNFGTVFLDNGYYNKAIAASPVHALPGYIIGGICWFAIPWLTATTMGLAGLALENNPRFPTYPDRMLDSDVSAGLVLPYAAVALLGKGGAMATLLIVFMAVTSAFSSQLIAVSTICTYDLYRAYFKPEASGKRLIYMSHCVVVGYGLFISTFSVGLWYAGISMGYLYVMMGVIISSAVLPATLALLWSGQNKWAAAGAPVLGLATSLTAWLVTSKKQCGELTVQCTGSNIPMLAGNVAALLSPVVFIAILTAIFGVDKYDWKSMLEIRRGDDHDLAQEAGVDLEDVNGGHEETQAEFEAEQSKLLKAGKISRWTTVILALAFLVLWPMPMYGSGYIFSKPFFTGWVTIGIIWIFGSFIGVGLFPVWESRATLTRTCKYIWKDLTGKSHIKTIHAQEAAVVGTPGDQTPPEKAGLKEEVRSS

SEQ ID NO: 80 - protein, 682 aa, Glomerella_graminicola
MVTAALSQGVGYGIVLGLGLLFAIGMIATTYVLKRYNRELQTSENFTTAGRTVKSGLVGSAVVSSWTWAATLLQSSGVCYRYGVSGPFWYASGATVQILLFATLAIELKRRAPNAHTFLEVIKARYGTATHLVFIVFGLMTNILVTLMLIVGGAATVNALTGMHTVAAIYLLPVGVVAYTLVGGLKATFLTDWVHTFILLIIIIIFSLTTYANSDVLGSPSKVYDLLVEAAFRHPVSGNAEGSYLTMKSQGGVEFFVINIVGNFGTVFLDNGYYNKAIAASPVHALPGYILGGLSWFAIPWLTATTMGLSALALESSPRFPTFPNRMTDAEVSAGLALPYAAVTLLGKGGAAATLLMIFMAVTSASSAELIAVSSIFTYDIYRTYFKPDASGKRLIYMSHVVVVVYAIVISSVSVGLYYNGISMGYLYLLMGVLISAAVLPATLTLVWKGQNKWAATLSPIIGTVFAIIGWLVTAKKTCGVLDVACTGSNSPMLAGNVIALLSPLVLIPIFTLAFGIDKYDWKSMMAIRRGDDHDLASAAGLDLEEVTGHHESQADFEREQAMLSRAFQISVSMTVFMTIAMLILWPMPMYGSGYIFSKPFFTGWVVVGILWIFCSFFAVGLYPIFEGRATLIHTVKSMVSGKKPTRHSTTVTHGEQEVTEKTSLGTVTPEKKDGGKETISS

SEQ ID NO: 81 - protein, 664 aa, Schizosaccharomyces_pombe
MVQPELTQSVGYGIVVGLGLGFAALMIFVSWSLKKFNNENQTSEHFNTASHSVRTGLVASAVVSSWTWASTLLTSAQKTYQYGVSGAFWYASGACVQILLFTVLAIELKRKAPNAHTFLEVVRARCGPIAHGVFLVFAYITNILVMAMLLCGGSATISSVTGMNTVAVCFLLPVGVIIYTMFGGIKATFLTDYIHTVIILVILIMFSLATYSADKKIGSPGKLYDMLKEAGDAHPVAGNAQGSYLTMRSQEGAIFFIINLAGNFGTVFVDNGYWQKAIAANPASALPGYILGGLAWFAIPWLAATTMGLVALGLENKPYFPTYPNRMSDLEVSEGLVLPYAAIALMGRAGANATLLLVFMAVTSAASAELIAVSSIFTYDIYKQYVRPRATGKELLYTGHASLIVFGFAMSGFATGLYYGQVSMGYLYLLMGVLVCPAVVPATCVMLFSRVSTIAVTVSPVLGIISSIITWLVVARAEGGKTLTIETTGANNPMLAGNVVGLLSPALYILILSIIFPEKYDFNRLLATFAMHFSSEEDEIQQTKKLNRASVISKVAALIITAAFIILWPWPMYGTGYIFSKRFFTGWVVVGLIWIFFTVFAVGIFPLWEGRNDIYQVVSNMAASIFGRKVNDIVEDEGVVVETISIGSGSKEKVNFEKKDIESV

SEQ ID NO: 82 - protein, 694 aa, Leptosphaeria_maculans
MAGGGTPVGPSASPLGQAWGYGIVLGIGFLFALGMVFTTWVLRRYNNELQTSEMFSTAGRSVKSGLVASAVVSSWTWAATLLQSSSVAFRYGVSGPLWYAAGATVQILLFATVAIELKRRAPNAHTFLEAVRARYGKATHCVYITFGLFTNILVTAMLLTGGSAVITSLTGVPTAAACFLLPLGVVIYTMFGGIKATFLTDYIHTVILLVILLIFAFTTYATGDRLGSPKAVYDRLQELSNITPVPGNAGGSYLTIRSKEGAIFFVINIIGNFGTVFMDNGYYNKAIAASPVHALPGYIIGGLSWFAIPWLCATTMGLAALALQNTEYFPTYPNVMAEADISAGLTLPYAAVALLGSGGAVGTLLIVFMAVTSAFSAQLIAVSSILTYDVYGAYINTNASGKRLVYTSHVCVCGFGLVMAGFSTGLHYAGISMGWLYVFMGVIISSAVLPAALTLMWKGQNKWAATLSPILGLCCSITAWLVTTSKLNDGVISVATSGANNPMLAGNVVALLSPMVFIPVFTLIFGVDNYDWISMKQIRLVDDSDVTAAANMDLEAVHGRHSALSPEAEAAEQAKLFRASRIAKITTATLTLILLVLWPMPLYGSGYIFSEKFFAGWVIVGIIWLLCSTLAVGVYPLWEGRASLKRNFGGMWREVTGKGRPSAARITFVGVKKDGEVSGMHTPKEADGDVIEKK

SEQ ID NO: 83 - protein, 732 aa, Sordaria_macrospora
MAGGGDTTVKVDTPHALNQGVGYGIVIGLGALFALGMILVTFILKRYNRELQTSEMFNTAGRTVKSGLVGSAVVSSWTWAATLLQSSGVCYRYGVSGPLWYASGATVQILLFATLAIELKRRAPNAHTFLEAIRARFGTMPHIVFMVFGLVTNILVSLMLIVGGSATINALTGMHTIAAIYLLPVGVVAYTVVGGLKATILTDWVHTFILLIIIIVFALTAYASGEALGSPSEVYDLLVKAAQAHPVEGNHEGSYLTMRSREGAIFFVINIVGNFGTVFLDNGYYNKAIAASPVHALPGYILGGLCWFAIPWLTATTMGLSGLALENNPRFPTYPNRMPEADVSAGLVLPYAAVALLGKGGAAATLLIVFMAVTSATSSQLIAVSSIVVYDLYRTYIKPEASGKRLIYMSHVVVAAYALFIATFSVGLWYAGISMGYLYVMMGVIISSAVLPAALVLTWSGLNKWAAALSPVLGLCVALVAWLITAKKECGEMSVACTGSNMPMLAGNVAALLSPVVFIPVLTLIFGKANYDWKSMMEIKRGDDTDVVAGEAGVDLDLEETMGGREETEREREMMEEEQGKLSRASKISKTMTAVLTLALLILWPMPLYGTGYIFSKPFFTGWVVVGIIWIFCSFIGVGLFPIYEGRDTLIRTCKYIYWDVTGKKNVRAIHAEQAMAAHTAGGVLDGEVVVTEGVTEGVMMTPGDQTPEEKSVKGLGEKGEKVGMGMGVTSL

SEQ ID NO: 84 - protein, 692 aa, Phaeosphaeria_nodorum
MAGGGAPIGPSASPLGQAWGYGIVLGVGFLFALGMILTTWVLKRYNNEVQTSEMFSTAGRTVKSGLVASAVVSSWTWAATLLQSCSVAFRYGVSGPFWYASGATVQILLFATVAIELKRRAPNAHTFLEAVRARYGTATHFVYITFGLFTNTLVTAMLLTGGSAVISSLTGVPTAAACFLLPLGVVVYTMFGGIKATFLTDYVHTVILLIILLTFAFTTYASGTALGSTEAVYKALNKLSDEMPVPGNAGGSYLTMKSKDGAIFFVINIIGNFGTVFMDNGYYNKAIAASPVHALPGYIIGGLSWFAIPWLCATTMGLAALSLQSSPSFPTYPNLMTESEISAGLTLPYAAVALLGSGGAVGTLLIVFMAVTSAFSAQLIAVSSILTYDIYGTYINPQASGKRLIYISHSCVAGWGIVMAAFSTGLFYAGISMGWLYVFMGVIISSAVLPATLTLMWKGQNFWAATLSPILGLACSLTAWLVTTSKLNDGVISVATSGANNPMLAGNVVALLSPMIFIPVLTLIFGIDNYDWESMKNIRLGDDSDVTAAAHLDIEHVVGRHGALSPEAEAAEQAKLLRASKIAKYTTATMTLALLVLWPMPLYGTGYIFSQKFFSGWVIVGIIWLLCSTMAVGVYPLWEGRKSLARNFGGMWRDLTGKGRKPMPHVVEGEKMAESGTHTPTAKEAEATTVVG

SEQ ID NO: 85 - protein, 687 aa, Magnaporthe_oryzae
MSTHVPAALDQGTGYGIVLGLGALFAFGMIFVTFVLKRYNAERQTSEMFNTAGRTVKSGLVGSAVVSSWTWAATLLQSTGVCYRYGVSGPFWYASGATVQIILFATLAIELKRRAPNAHTFLEVIKARFGTAAHITFMVFGLVTNILVSLMLIVGGSATVNALTGMHTIAAIYLLPVGVVAYTMVGGLKATILTDWVHTFILLVIIIIFALTTYATSEDLGSPSAVYDLLVEAASRHPVEGNKDGSYLTMQSKEGAIFFVINIVGNFGTVFLDNGYYNKAIAASPVHALPGYILGGLSWFAIPWLTATTMGLAAIALESNPRFPTFPNRMSDDEVSEGLVLPYAAVALMGKGGAVATLLITFMAVTSATSSELIAVSSIFTYDFYRTYFNPSASGKRLIWMSHCIVVGYAAFIATFSVGLWYAGISMGYLYVMMGVIISAAVLPAALTLTWSGLNKWAATLSPICGLVAALAAWLATAKRECGVLDVKCTGSNNPMLAGNVVALLSPVVLIPIFTVIFGLDKYDWVSMMNIRQADDHDITDAAGVDVEVAPAEEAETQANFEEEQRKLVRAGKISKTMTVLMTVAFLVLWPMPMYGTGYIFSKPFFTGWVTIGIIWIFCSLGAVGLFPIYEGRKTLVNTFKFMISDLGGKPRLKRLDAQQVGSPSGGSTPAEKAQDSKDGAVQVTPA

SEQ ID NO: 86 - protein, 656 aa, Schizosaccharomyces_japonicus
MAINPPLSEAAGYGIVIGLGLGFAAIMIVISWILQYFNNETQTSEHFNTASHSVRTGLVASAVVSSWTWASTLLTSSQKTYQYGISGAFWYASGACVQILLFTVLAIELKRRAPGAHTFLEVVRVRCGSFTHSVFLLFAFITNILVMAMLLAGGSATISSLTGVGVPAVCFLLPVGVIIYTMFGGIKATFLTDYIHTVIILVILIMFSLAAYAGSSRLGSPGKVWELLKSAGEQHPVEGNAQGSYLTMRSREGAIFFIINLAGNFGTVFVDNGYWQKAIAANPASALPGYLLGGLAWFAIPWLAATTMGLVCLALENTSYFPTFPNRMSDMEVSEGLVLPYAAVALMEKTGANATLLLVFMAVTSAASAELIAVSSIFTYDIYKQYIHPRAGGRELLGMGHIALVVFGFSMSGFAVGLHYAGVSMGYLYLLMGVLVCPAVVPACAIMLWDRTTPLAAALSPVLGLASSLVSWLVVARCEGGSKLTIETTGANNPMLAGNVVGLLSPVIYVVVLSLWNPHKFDFNQLLEYFRIDHGFDYDELLEERKMKRAAKLARISAVISTLFFIVLWPWPMYGSGYIFSKGFFTAWIVAGLVWIFFTVMAVGIFPLYEGRKEILRICKAIITWTRPSLPVYEDKEVIEETCETSSLEKKKELAA

SEQ ID NO: 87 - protein, 687 aa, Pyrenophora_tritici-repentis
MAGGGTPIGPSASPLGQAWGYGIVLGIGFLFALGMVFTTWVLKRYNNELQTSEMFSTAGRTVKSGLVASAVVSSWTWAATLLQSSSVAFRYGVSGPLWYAAGATVQILLFATVAIELKRRAPNAHTFLEAVRARYGKTTHLVYITFGLFTNILVTAMLLTGGSAVISSLTGVPTAAACFLLPLGVVIYTMFGGIKATFLTDYVHTVILLIILLIFAFTTYATGDRLGSPKAVYERLQELSETTPVPGNAGGSYLTMRSKDGAIFFVINIIGNFGTVFMDNGYYNKAIAASPIHALPGYIIGGLSWFAIPWLCATTMGLAALALQNTEYFPTYPEVMDEASISAGLTLPYAAVALLGSGGAVATLLVVFMAVTSAFSAQLISVSSILTYDIYGTYINSSASGRRLVYTSHVCVCGFGLVMAAFSTGLCMGWLYVFMGVIISSAVLPATLTLMWKGQNKWAATLSPILGLCCSITAWLVTTSKLNDGVITVATSGANNPMLAGNVVALLSPIIFIPVLTLIFGFDNYDWVSMKNIRLVDDSDVTAAAHMDLEAVHGRHAALSPEAEAAEQAKLFRASKIAKITTATMTLVLLVLWPMPLYGTGYIFSQSFFSGWVIVGIIWLMCSTMAVGVYPLWEGRESLARNFGGMWRDVMGKGRHRGDHVEVTEGEKTGESGTNTPKQAYAKALEQ

SEQ ID NO: 88 - protein, 673 aa, Nectria_haematococca
MAGSGTPALSQGAGYGIVLGVGLAFAVFMISLTHILKRHNNEVQTSEMFNTAGRSMKSGLVAAAVVSSWTWAATLLQSSGVCYRYGVSGPFWYASGATVQILLFATLAIMLKKRAPNAHTFLEVIKARYGSPAHFTFIVFGILTNVLVPLMLISGGAATVNALTGMNTIAAIFLLPVGVVEEPFQLIGGLKATFITDYIHGGVVLIIIIIFALTAYASSDVLGSPSAVYDLLVEAAKAHPVSGNQDGSYLTMRSKGGVTFFVINIVGNFGTVFLDNGYYNKAIAAHPVHALPGYIIGGLAWFAIPWLTATTLGLSALALESNPRFPTYPERMSEADVSAGLALPYAAVALLGKGGAIATLLMVFLAVTSSFNSELVATSSIFTYDIYRTYFRPNASGKSLIWMSHACMVVYALIICCISVGLWYNGISMGYLYLLMGVLISAAVLPATLTLIWRGQNRWAATLSPILGAACAISAWLATASKTCGKLDVTCTGSNDPMLAGNLTALLSPVIFVPIFCLIFGFDKYDWQSMMDIRKADDHDVIKESGLDEEAQRQVAAAQAADFEEEQRKLEKAFKIASTMTIILTLSFLVLWPMPMYGSRYVFSKPFFTGWVSVGIAWIFLSLFAVGIYPLWESRATIARVCTSLVKGRRPNTIVQGEAMMEESSGRATPEKQ

SEQ ID NO: 89 - protein, 678 aa, Metarhizium_anisopliae
MSSPGPALSQGFGYGIILGVGFAFAIFMVALTHILKRFNNEVQTSEMFNTAGRTMKSGLVAAAVVSSWTWAATLLQSSGVCYRYGVSGPFWYASGATVQILLFATLAITLKKRAPNAHTFLEAIKARYGPPAHFTFITFGLITNVLVSLMLIAGGAATINALTGVHAVAAIFIMPVPVVAYTFVGGLKATFITDYIHGFALFIIIITFALTAYATSDVLGSPAAVYDLLVEAAARHPVAGNQDGSYLTMRSQGGAIFFVINIVGNFGTVFLDNGYYNKAIAAHPVHALPGYIMGGLAWFAIPWLTATTLGLSALALESSPRFPTFPNRMTEAEVSAGLALPYASVALLGKGGAAATLIMVFLAVTSSFNSELVATSSIFTYDIYRTYFRPGAKGKHLIYMSHVCMVVYAAVICCISVGLWYNGISMGYLYLLMGVLISAAVLPATLTLLWRGQNRWAATASPILGTACAIVAWLVTAKKTCGALDVTCTGSNDPMLAGNVTALLSPVVFIPVLCLVFGLDKYDWQSMMDIRRADDHDMLENEGLDAEAQRVAEMAEQANFDQEQRKLDRAFKIACIITISMALSFLILWPMPMYGSGYIFSKKFFTGWVTVGIIWIFCSFIAVGLYPAWESRDTLVKVVRLIVTGKRPQPVLVAEQETSADSSGTATPTKSGSVSKTG

SEQ ID NO: 90 - protein, 676 aa, Metarhizium_acridum
MSSPGPALSQGFGYGIILGVGFAFAIFMVTLTHILKRFNNEVQTSEMFNTAGRTMKSGLVAAAVVSSWTWAATLLQSSGVCYRYGVSGPFWYASGATVQILLFATLAITLKKRAPNAHTFLEAIKARYGAPAHFTFITFGLVTNVLVSLMLIAGGAATINALTGVHAVAAIFIMPVPVVAYTFVGGLKATFITDYIHGLALFIIIITFALTAYATSDVLGSPAAVYDLLAAARHPVDGNRDGSYLTMRSQGGAVFFVINIVGNFGTVFLDNGYYNKAIAAHPVHALPGYIMGGLAWFAIPWLTATTLGLSALALESNPRFPTFPNRMTEAEVSAGLALPYAAVALLGKGGAAATLIMVFLAVTSSFNSELVATSSIFTYDVYRTYFRPEAKGKHLIYMSHVCMVVYAAVICCISIGLWYNGISMGYLYLLMGVLISAAVLPATLTLLWNGQSRWAATLSPILGTACAIVAWLVTAKKTCGRLDVECTGSNDPMLAGNVTALLSPVVFVPVLCLAFGLDKYDWQSMMDIRQADDHDVLESSGLDAEAQREAEMASQANFDKEQRKLDRAFKIACIITISMALSFLILWPMPMYGTGYIFSKKFFTGWVVVGIIWIFCSFIAVGLYPAWESRDTLIKVVRLIVTGKRPQPVLVAEQDASADSSGTATPIKSRSVSKAG

SEQ ID NO: 91 - protein, 683 aa, Pyrenophora_teres
MAGGGTPIGPSASPLGQAWGYGIVLGIGFLFALGMVFTTWVLKRYNNELQTSEMFSTAGRTVKSGLVASAVVSSWTWAATLLQSSSVAFRYGVSGPLWYAAGATVQILLFATVAIELKRRAPNAHTFLEAVRARYGKTTHFVYITFGLFTNILVTAMLLTGGSAVISSLTGVPTAAACFLLPLGVVVYTMFGGIKATFLTDYVHTVILLIILLIFAFTTYATGDRLGSPKAVYERLQELSETTPVPGNAGGSYLTMRSKDGAIFFIINIIGNFGTVFMDNGSIAASPVHALPGYIIGGLSWFAIPWLCATTMGLAALALQNTEYFPTYPEVMDEASISAGLTLPYAAVALLGSGGAVATLLVVFMACTSAFSAQLIAVSSILTYDIYGTYVNPGASGRRLVYTSHVCVCGFGLVMAAFSTGLCMGWLYVFMGVVISSAVLPATLTLMWKGQNKWAATLSPILGLCCSITAWLVTTSKLNDGVITVATSGANKPMLAGNVVALLSPVIFIPVFTLMFGIDNYDWASMKNIRLVDDSDVTAAAHMDLEVVHGRHAALSPEAEVAEQAKLFRASRIAKMTTVIMTLVLLVLWPMPLYGTGYIFSQSFFSGWVIVGIIWLLCSTMAVGVYPLWEGRESLARNFGGMWRDVTGKGHRRGDHIEVTEGEKKGDSGTNTPKEAHAKALEQ

SEQ ID NO: 92 - protein, 695 aa, Phaeosphaeria_nodorum
MADAVAVKTPLPVGAGYGVVIGIGFFFAFLMMFISYLQNRYTQYSTHQSEEFNTASRSVKPGLIASGIVSAWTWAATLLQSSTVAYTYGVAGPFWYAAGATVQILMFSILACKVKQNAPRCHTYLEIIKARYGTFAHLVFMLFAFVTNILVGSQLLLGGSAVVTSLTGMPVYAAIFLIPVGVCAYVILGGLRATFLCDYSHTLILMIIILYFMFNAYAISPLIGSPGEMFDLLKKAGAQRPIEGNKDGSYLTLKSNYGLIFGVIQLCSGSGTVFLDQAYWQRAIASKPSTAVRAYLLGGLAWFAIPFGFSTTLGLAAAALTDHPNFPTYPNVPTPGQISSGLAAAFAAETLMGQGGAIALLIVLFMAVTSCASAELIAVSSLLTFDIYKEYIQPKATPKQLIFVSHIMICVFGLTMSIFACIWNAASIDLGWLFLVMGLLIGGAVFPTAFSILWRKQTKAGAIAGCLSGLAAGLTAWLTTAKHYYGEITIETTGLSYPTLAGNLASIMTGLIVTTTISLIKPDNFDWEITRAINAVVVDGTLQDGTVTPRDTSTPELSDSNEKKDATEVSAPPATHASQDELPPHLAPTAKEEDDPKTLRSAFKMACIFAFVLTFILDFLLPMPMFFSGYIFSKGFFTGWVVLSAAPMGDERWPGKTGEEGHCRLCKEEVRMKKKGGHGQVLWDDVIGLECSAFI

SEQ ID NO: 93 - protein, 672 aa, Pyrenophora_teres
MADATKTPLPVGAGYGVVVGIGFFFAFIMMGISYLQNRYTRYSTHQSEEFNTASRSVKPGLIASGIVSAWTWAATLLQSSTVAYQYGVAGPFWYAAGATVQILMFSILACKVKQNAPRCHTYLEIIKARYGTLAHLVFMVFAFVTNILVGSQLLLGGSAVVTSLTGMPVYAAVFLIPVGVCAYVILGGLRATFICDYSHTLILMIIILYFMFNAYAVSPLIGSPGEMYDLLKKAGTQRPIAGNHEGSYVTLKSNFGLVFGVIQLCSGSGTVFLDQAYWQRAIASKPSTAVCAYLLGGLAWFAIPFGFSTTLGLAAVALTDNPRFPTYPNAPTSAQISSGLAAAFAAETLLGQGGAVALLVVLFMAVTSCASAELIAVSSLLTFDVYKEYISPKAEPKQLVFVSHMMICVFGLTMSVFACIWHAASIDLGWLFLVMGLLIGGAVFPTAFAITWRKQTRVAAISGCLSGLAAGLTAWLSTAKVYYGAINIHTTGLSYPTLAGNLAAIMTGLIVTTTITLIKPDNFDWEITRSINAVITDGLSHEDSPTPELSDSGEKGSVAEPTTQPAAMAELPPHLAPTLEEPDDPSTLRRAFKLACISAFLLTFILDFLLPMPMFFSQYIFSKGFFTAWVIISFMWVFASSAISCILPIWETRGTFAMLFRKISQDFRGKKS

SEQ ID NO: 94 - protein, 699 aa, Aspergillus_nidulans
MISTSSLSEELCTVKRQFAMSSTVAPVLPQGAGYGVVVGIGLFFALLMACVSYLQNRYTQYSTKTSEEFNTASRSVKPGLIANGVVSAWTWAATLLQSSTVAYEYGISGPFWVDAAGSTVQIFMFSVLACKVKQNAPYCHTFLEIVYHRYGQATHLVFVFFALMTNTLVASQLLLGGSAVVTALTGMNVYAAVFLIPLGVCIYVVLGGLRATFLCDYTHTVIVMVIILYFMFDVYTRNELIGSPSQMYDLLKTAAVERPVEGNIEGSYVTLKSNSGLVFGVIELCTGLSTVFLDQGYWQRAIASRPTTAVRAYIMGGLSWFAIPFGFATTLGLAAVALTNNPRFPTYPNNMTSSQISAGLAAPFGATALAGKGGATALLLTLFMAVTSSASSQLIAVSSILTFDIYKTYLKPKATPQQLIFVSHIMICIFGVVMACVACLWNGIGIDLGWLFLVMGLLIGGAVFPAAFTILWKGQTRLGAVCGAIGGLAAGLIAWLVEAKVYYGELTVATTGANYPTLAGNMASVLTGLILTVGISLLKPDDFNWEKTRAINAPATYNPEPVIESKPPMAIKTTRVDQSEKTADSAVIEDPKALQKTFVMAVVVSAVLSLIMDIIIPIPMFLSHYIFSKGFFTAWVVISFLWVFAAFFLCGILPVVETRRFWGMLFKRMFGKKVVLDAQVQQGQSSEDDAQRASKDSIA

SEQ ID NO: 95 - protein, 924 aa, Pichia_angusta
MSIDTSNGQFIIFSQGVGYGIVIGVGAVFAVTMALISWLLSRYMNEVQDSEMLSTAKRSIKSGLIASAVVSSWTIASTLLLSTTTTYNLGISAAWWYGGGACVQIIIFATMAIELKRKAPNAHTFQEIIKVRFGTVGHLTMCFYSLAQQVVYTANLLINGASVFSNMTGMSKEATCVLLPVFVIVYTLIGGIKATFLTDWTHVVIIFVIMMTFMFKVYATSDLLGSPEKVWELLNEAAKTYPVAENLDGSYLTFTSVNSGLFGLILLGAGWAAAVDSQLFQKAIAANPAGALTGYTLGGLCWFTLPYALATTMGLACRALEQTSNFPVPGGLTEQQLSNGLVLPISAYAIMGKGGAIAILLMVFMAITAAYSSETVAVSSLLTYDIYKSYINPKADGKRLVLVTHLSVIIFSAVAIGLAIGLGQANFDVSFITTASGIIVNVCVIPMICTLFWKKLSTFAFVASSTLSTCISLAIWIGYSYSASKSVTITTLSTYRALAAGNTAAIFVPIIFVPLFTYLKPADFDWNKWKTEIKQVDDSEFDKEQGLTNVLSGEDLTEIVLTKEQEEDAMMKRKRNYGIGLAVFFVLFFLVLFPMPLYGSHYIFTKTFFRGYIVVTFLWVFFSVSIVTVYPVVESWNGIKTLFKNIFTRKRSPVLYSEQILSQVNNKYMDKYEIVCDMGEGFGKWKMGPDEELMPLIDVANIACGFHAGDFNIMAKMVKLAKKYDVKVGSHPGLPDLLGFGRRRFAIPPDEIFNLVMYQTGALKAFLDAEGMPLNHIKPHGELYFYVERDEEVMRAVLRAAQIFKVPVVGAKNAHYEKVAKEMGVDLIQELYLDVDWSADGKLVPPALSRAKNPSIIYNDLVEVAETDELSCVSGEKIKFNFGETPFMLCLHSDMPTALGNVTEARKAIDEINKKRGFPVKKSY

SEQ ID NO: 96 - protein, 688 aa, Penicillium_marneffei
MSTSADVFQIAAPLSAGVGYGIVVGVGALFAIGMSLTSWLLSTYMNEIQDSEMFMTAKHSVKAGLTASAVVSSWTIATTLLTSTTYGYSYGVSGPFWYAAGACVQILLFSVAAVELKRKAPNAQTFLQVIKVRYGSAVHILFTLYSGVYQIITTVNLLVGGSAIFAAVTGTNRDAICYLFPIGVVIYTLMGGIKATFITDWVHTVLIYIIMLVSLFVFYTTSDIAGSPTRVWELLQEAATLHPVAGNANGQYLTMRSEEGGYVGLVFIGAGFAACVDSQLFQKAIASDPRTTSLGYIIGGLSWFTIPFVLASTYGLAAAALEHLPSWPTYPNRMNAYETASGLAMPYAAIALMGNGGAVAVLLMIFMAVTSAMSSETVATTALVTYNIYQAYIKPDATGRQLLYFSHFITVGFAIFCSSIAVAFNHGGFSVGFLITAIGIFVDSAIVPMACTIMWRKQSRIAAFVVPVIGSIAGIIAWFTLTYTTYGVITIDTLSGNLPLVAGNIVALGSPLILTPLVTYISPENFDWNILKEELKRGTDENITVSATSPEHAAALIQEERREEEENEKSLIKARNRSLFLGWFLTISLVILWPIPMYASSYIFSPKFFTGWVAFLFIWAFLATGVIVFLPIWEGYDAMMLVFKHMMGKGQKAQGRSVVTITREGLEEASDASTERTKPYSEKEKDYP

SEQ ID NO: 97 - protein, 671 aa, Cryptococcus_neoformans
MSSTVLPQGAGYGVVIGMGLFFSLLMVGIAKLQTRYTSHKTSSAEEFNSASRSVPPGLIAAGIVSAWTWAATLLQSSATAYKFGISGPWWYASGAAIQVLLFAMISSKLKQHAPFCHTYLEIIKARWGRAAHLVFLFFALATNIIVSTMLILGGSATVTDLTGMNTVAACFLIPLGVSIYVLTGGMRATLIADYSHTLVLYCILISFALVAYATSPIIGSPSKMWELLNYAAEANPISGNAQGSYLTMRSKSGLIFGVLNIVGNFGTVFNDQAYWQRAIASDPKTSVKAFLWGGIAWFGIPLGIATSLGLSAVALAHGTSTPIITLTPDEVSAGLPAVKAASALMGQSGATAMLILLFLAVTSACSAEQIAVSSILTYDIFGTYIRPNPSEKQILWVSHVCIFSYALFMGAIATAFNYIGVSMGYLYELMGCIIGSAVVPIALCITWRKCNGTGACVGAVLGFCAGVAGWLGITSTLNDGVINVTTTFGDYEMLTGNLLSIGVGGIITVAWSYIHPANFDWDITRSINNKEDFTLTENTAPPLAYDDEKEKLDGEGEGFQGGAEPMRNTTHTTVEAQPTDMTKENEELQKAFRFAAIAALSLVVILIFVIPLPLFFTSHVYPVKGFTAWVCISLIWLFVGLGMVGVYPAWEAREGLMKVGKGIVRDITRQN

SEQ ID NO: 98 - protein, 713 aa, Aspergillus_flavus
MTVATLGVAGIDLIPQGTAYGLLIGLGVLFCGVILVAIKVQKAYLSEDSATSEMFMVANRSVGTGLTASAVFSSWMWINETVLSAAMCYRYGLAVPLWWGSGLCFQIALMAALGVMAKIRVPYAHTSLEIIKMRYGWIGHLVFIVLNLTNNVFGCASMILTGSQLIYGVSGMHFVAATILIPLGVVLYTAVGGLKATFLTDFLHTTVALILIIYFTLSVLTHPAVGGLGGLYDKVVATASENYISGNFEGSLLTMKSKDAIIWGLVLKFGNLALVVMDTAFWQKSFASEVNSTVPAYNLAAVAVFGIPWGLGTVIGLSARALHNTPIFPTYPGPLTSAEVNAGMVMPYLVKALIGDSGIVAFFILLFMALTSTVSSSMIAVSSILSFDLYKTYFNPKASDKRLLHVSHISVVFHAVFITGISIALNYGGANMTWIGYFRPILSCPGIIPLALTLFWSGQTRLAAIVSPVLGFFTGLAIWLASAKSLYGAVNMTTTGEGLPALYGAIGSFFSPALYSVIISLYKPYKFDWREFLRIELADEAQLHASDPSITTTSQENQSSEKAIEQSTSPTPESPPSETASTNDPERIGADEKVMTVSATPAIASPTQLSLDDIRHPFSDETLKELYRWSRIAWAIFVVLVLITFILWPMPLYRNYIFTKSFFSGWVTVAIIWQFFAFLAVVVYPLYDGRFEIEKGVKGIWKTANDYLAKRRS

SEQ ID NO: 99 - protein, 676 aa, Coprinopsis_cinerea
MAEYLLPQGAGYGVVIGMGLFFSAFMILLTAIQARYTGFSPKDSEEFTSASRSIKPGLIASGIVSAWTWAATLLQSSAVAYKYGLSGPWWYGAGATVQILLFAMLAAKLKLNAPYAHTWLEIVGARWGRTAHLVFMFFGLATCLIVSSMLILGGSATVTDLTGMHTIAACFLIPLGVAIYVVVGGMRSTLLCDYTHTAVLFAIILTFIFTVYATSEKIGSPAKMHELLTLSSLINPVEGNKEGSYITMRSENGLVFGIINIVGNFATVFQDQAYWQRAIASRPATTVKAYLLGGLAWFSIPFTFATTLGLAAVALRGDPQMKVLTPADVSAGLPASAAAAALLGKAGAAAILILLFLAVTSACSAELIAVSSLLTYDVYKAYINPNASEEQILRVGHAGVALYAIVCGIAGTIFYYIGVSMGWLYTFMGVLLGSAVVPIALAITWHKANKWGCIGGAVLGFIGGMVAWLVTTAKLNHGVITVVTSGGDYEMLAGNVTSIGFGGIIAVVSSLIWPDNFDWETTRSINRPAPPSPDAAEQDSKSDLENEKKNASEVVTKPASIADSFDANEEANELDPVALRKAFRFASWASISLFVVLILLIPLPLFFSQHIYTVAGFTGWVAVGISWTFFSIFAVVIYPLWESRVAMYQISKGVIKDIFMKGGGRYQAEPPKTSAA

SEQ ID NO: 100 - protein, 713 aa, Penicillium_chrysogenum
MSNTIDTSKLALIPQGAAYGLLIGLSVLFCGVILIAVKVQKAYLAEDSGKSEMFMVANRSVGRGLCASAVFSSWMWINETVLCAAMTYRYGLAVPLWWGSGLCFQIALMAALGVMAKIRVPYAHTSLEVVRMRYGRIGHLVFIVLNLVNNVFGCASMIMTGSQLIHGVSGMHYVAATILVPLGVVLYTAVGGLKATFLTDFLHTAIALILIIYFTIAVLTNSSVGGLSGLYDKLIATAADNYIPGNYEGSLLTFKSKDAIIWGLILKFGNLALVVMDTAFWQKSFATEVKATVPGYNIAALAVFGIPWGLGTVIGLATRAIHDTPIFPTYPSLLTATEVSSGMVMPYTIKALIGDKGIIGFFFLLFMALTSTVSSSMIAVSSILSYDIYKTYLNPKATDKQIVGVSHLTVVIHGVFITGISIALNYGGANMTWIGYLRPIISCPGIIPMILTLFWSRQTRIAAIISPVLGFFTGLAVWLATTQYMYGTINITTTTNPYPALYAAIASFFTPALYSVVLSVYKPYKFDWRVFLRIELADQAKAQPRPPDTTTLNEISQEDPASDSKGVAESVKPVVDSQPESINNDPEQIGDKDEKNHTKQASSQNCEEINLDVQHPFDDATLDELYRWLKIAWYMFGAIVLITFVAWPLPLYRDYIFTKSFFSGWVVVGIIWQFAAFGAVVIFPLYDGWHDIAIGARGIWKSSKEYIDRAKRS

SEQ ID NO: 101 - protein, 659 aa, Nectria_haematococca
MALSGVPELVKRASDSIEPPLPQSAGYVVVIVVGFLIAFFMMFATHVLKKTVGEDNKTTEMFMTANRRVGTGLTASAVISSWLWSTAMLGSSLVGYNFGVAGPFWFAAGCSPMIVFFSLLGIACKLRVPEAHTLLEIVRIRYGTAGHLVWIALCLINNIIAIANMLLGASAAITALTGMHIIAATFLLPVGVVLYTFVGGIKATFLTDYFHTFVITIIICFFTIKTFLTPEIGSPSSLFQLIVEAGKANPVAGNEDGSYLTMTSKGAIYFGIIHVLANFGLVIMDTGFFAKAFSAAPQAVVPGYIVGGIAYFGIPWCLGTLMSLSAIALESSERFPTYPRRMSIVEVSNGLVMPYAAIAIAGKGGAVAVLLITFMAVTSTISAQVISVSSIISFDIYRQYFNRDATDRDAIRWSHFGVVFFGLFSAAFSTALYYGNVDLGWTLYMLGVLTCPGIFPTVFTILWKKQSKAAAIISPLLGLATGIAVWLGSASSMYGEVTVASTGQTLPCVYGTVASALSPALYSVVISLIKPDNYNWADFRNERLAFDQTKTAGQSDEPVSHEERIVSYTADKAKLKRWGKLAAVWSLATFLGHWVLWPLPMYASKYVFGKGFFDAWIIVAIIWVWITMFIAGFYPIIDGWGQLKTRVAALKHRRFAKRS

SEQ ID NO: 102 - protein, 685 aa, Penicillium_marneffei
MSYSDSRADRTGVVVQPPLPQAVGYAIVVVVGIIIATVMIFITRLLKNTLGEDNKKTEMFMTANRTVRTGLTASAVVSSWLWSTALLGSSLVGYNYGVAGPFWFAAGCSPMIVFFALLGVSCKRKIPEAHTSLEVVRVRYGRVAHVVFMILCLINNIFACANMLLGASAVISAMTGMHVIAVTFLLPLGVSLYTFVGGIKATFLTDYFHTVVIVLVACYFSIKAFTFSEIGSAGNLYDLVQAAGARNPVSGNAQGTYLTMTSKDAILFGIIHICGNFGLVIMDTSYFIKAFAASPAAVVPGYTIGGIAYFAIPWALGTVMSCVAVGLENTPVFPTYPRRMTTSEVSSGLVLPFSALTIAGSGGAAAVILITFMAVTSTLSAQVIAVSSIISFDIYREYFNKSASDRQIIRWSHFGVVFFAFFSAAFSTMLYYVGADLQWTLYMLGVVTCPGIFPMAFTVLWRGQNTLAAILAPILGLVTGLAVWITTAHYFYGAVTVSSTGQVIPCVYGTVASAFSPLPYSVIITYLTGPQSYDWADFKKEHLAVEKLDSDLTTTHHVLKSPESQQQQQHNYEDPASAASNAKELQRWGRIAGFWSVATFLGHWVIWPLPMYGSRYIFGKGFFIAWVIVSIVWLWLTMLMVTFYPLIDGGIEQTVFVFKQLIGRDEKGIRERLEFGKRKDRSEDC

SEQ ID NO: 103 - protein, 680 aa, Aspergillus_nidulans
MAETAVQPPLSQAVGYIVVVLIGAIIALVMMLVTKVLKKTTGEDNKKTEMFMTANRTVRTGLTASAVISSWLWSTQLLGSSFTGYDYGVSGPFWFAAGCSPMIVFFALVGISCKRKIPEAHTSLEVVRIRYGHIAHAVFMVLCLVNNIFASANMLLGASAVISAITGMHIIAATFLLPVGVTVYTFVGGIKATFLTDYFHTTIILIIACYFSVKAFQSDQIGSVGNLYELLKSAGQRHPVSGNQDGTYLTMTSKDGILFGILHTCSNFGLVIMDTSYFIKAFSASPKAVVPGYAIGGAMYFSIPWALGTVMSSVALGLENQPNFPTYPRRMTSSEVSGGLVLPYAAMTIAGKGGAAAVLLMIFMAVTSTLSAQVIAVSSILSFDVYREYFKRSATDRDVIRASHLGVIFFAAFCAGFSTMLHYVGVDLGWTLYMLGVVTCPGIFPMVFTVLWRRQSKAAAILSPILGLATGLAVWLTTAGHFGGEVTVATTGQVLPCVYGTVASAFSPILYSVLITLIRPQDYDWSDFKKEKLSLEKLESDLTTVHHETRDSTAGSIEDGGVNSAAVKAQELKRWGRIAAFWAVATFLGHWVLWPLPMYGSHYVFGKGFYIAWVVVAIIWLWATMFVETLYPIVDGGYQQILQVYRGLRGRQPLPAVAKPGGESADGSISDGAQGEQVKA

SEQ ID NO: 104 - protein, 774 aa, Penicillium_chrysogenum
MYACDIPSIISSSISLLQPKQSFGRANLVKKHLIADTNQAIVDPISVIPQTCALNLIPVQGLGTLVSQMKHHLSVHGPRSILHARDGISSVQPPLSQAVGYVVVVVIGVIIALVMMLITKVLKRTTGEDNEKTEMFMTANRTVRTGLTASAVISSWLWSTALLGSSFVGYDYGVAGPFWFAAGCSPMIVFFALLGISCKRKIPEAHTSLEVVRIRYGHVAHIVFMILCLVNNIFACANMLLGAAAVITAVTGMHIIAATFLLPVGVTLYTFVGGIKATFLTDYFHTAIIMIIACYFSVKAFSTNQIGSVGELFDLVQAAAQRHPVSGNQDGTYLTMTSKSAILFGILHTLGNFGLVVMDTSYFIKAFSASAAAVVPGYTIGGIAYFAIPWGLGTVMSSVALGLENTPTFPTFPRRMTTTEVSNGLVLPYAAITIAGKGGAAAVLLITFMACTSTLSAQVIAVSSILSFDVYREYFKKKATDRDLIRASHFGVIFFAVFSAAFSTMLHYVGINLGWTLYMLGVVTCPGIFPMIFTILWRRQSKAAAILSPVLGLATGMAVWLGTASHFGGEVSVASTGEVLPCVYGTVASCLSPIVYSVLITLVRPQDYDWDDFKKVKLSLEKLDSDLTTAHRHQASSRGDDGSVEDGGRGSGDQKELKRWGRIAAFWAVATFLGHWVIWPLPMYGSGYIFGKKFYIAWVVVAIVWLWLSTLVAIFYPIFDGGVAQIRDVYRGLRQHKIVEGTGSSKDGKGGSSSPSVGSVSDVSHAGEPQENKS

SEQ ID NO: 105 - protein, 689 aa, Aspergillus_flavus
MTELTARGGNDSVQPPLSQAVGYVIVVVIGLIIAFVMMLITKVLKKTTGEDNKKTEMFMTANRTVRTGLTASAVISSWLWTTAMLGSSFVGYDYGVAGPFWFAAGCSPMIVFFALIGISCKRKIPEAHTSLEVVRIRYGRTAHIVFMTLCLVNNIFACANMLLGAAAVISAVTGMHIIAATFLLPVGVTVYTFVGGIKATFLTDYFHTAIILIIACYFSIKAFTIDEVGSIGKLYDLVQAAAQRHPVSGNHDGTYLTMTSKGAMLFGILHICSNFGLVIMDTSYFIKAFSAAPSSVVPGYTIGGIAYFAIPWALGTIMSSVAIGLENQPSFPTYPRRMTTSEVSGGLVLPYAAMTIAGKGGAAAILLITFMAVTSTLSAQVIAVSSILSFDVYREYFNRNASDRDIIRSSHFGVIFFAAFSAGFSTMLHYVGIDLGWTLYMLGVVTCPGIFPMAFTILWRRQSTAAAILSPVLGMATGIGVWLGTAQHFYGSVSVSATGQILPCVYGTVASAFSPILYSVVITLVRPQNYDWNDFKKEKLALERLESDLTTVHSHGKANRQENGLEEGARHISAFDPQELKRWGRIAAFWSIATFLGHWVIWPLPMYGSKYVFGKGFFSAWVVVAIIWLWVTMLVAIFYPIFDGGIQQITQVYRGLCVGNVRKEAVGNESSSSPSISDTGEEVKRDDRT

SEQ ID NO: 106 - protein, 602 aa, Metarhizium_anisopliae
MLPSRRDGVGDSGSIVEPPLPQAAGYVIVIVIGFLIALIMMAITRVLKKTAGEDNNKTEMFMTANRTVGTGLTASAVISSWLWSTAMLGSTLVGYNFGVAGPFWFAAGCSPMIVFFSLLGIACKLRVPEAHTLLEIVRIRYGTQGHVVWIVLCLINNIIAVANMLLGASAAISALTGMHIIAATFLLPVGVVLYTFVGGIKATFLTDYFHTFVITILVCFFTIKVFLVPEIGSPQDMFDIIAKAGQIHPVDGNRDGSYLTMTSKGAILFGIIHILANFGLVIMDTGFFAKAFSAAPHAVVPGYIVGGIAYFAIPWCLGTIMSFAALSLEDTERFPTFPRRLSPTEVSNGLVLPYAAVAIAGKGGAVAVVLITFMAVTSTISAQVISVSSIISFDIYRQYFNKAAKDSDAIRWTHIGVVAFGIFSAAFSTALHYGNVDLGWTLYMLGVLTCPGIVPTVFTILWKRQSKLAAISSPILGMATGIGVWLGSAAALYGEISVATTGQTLPCVYGTVASAFSPALYSVVVTIIRPDNFDWASFRNERLAFTASSTSVADVSESDKNEQKTHDEYIQSYAADKAKLKRWGTIAAVWSLATFLGHWVLW

SEQ ID NO: 107 - protein, 692 aa, Aspergillus_nidulans
MSSVGTDLIPQGTAYGLLIGLGVLFCGVILIAIKVQKAYLSEDSATSEMFMVANRSVGTGLTASAVFSSWMWINETVLCAAMCYRDGLAVPLWWGSGLCFQIALMAALGVMAKIRVPYAHTSLEIIKMRYGTIGHLVFIFLNLVNNVFGCASMILTGSQLVSGVSGMHFVAATILIPLGVVLYTAVGGLKATFLTDFLHTAVALILIIYSTLSVLTNEHIGGLGGLYDKVMATASENYIPDNYEGSLLTMKSKGAIIWGLVLKFGNLALVVMDTAFWQKSFASEVNSTVPAYNLAAIAVFGIPWGLGTVLGLSARALHLTPIFPTYPADITETEVSTGLVMPFLVKALIGDSGIVAFFVLLFMALTSTVSSSMIAVSSILSFDIYKTYFNPKATDRKLLRASHVTVVIHAVFITGISIALNYGGANMTWLGYFRPVLSCPGIIPLGLTLFWSGQTKLAAILAPVLGFFTGLAIWLGTAHALYGEVNMITTGNPLPALYGAIGSFFSPAIYSVVISLYKPYKFDWRIFLRIELAAEAQLHSADKSKATVIESEVKEKSGTNTPKRDTSDAAAATTATADPEHAAALEKPNPASRANSTPVSESSLDDIRHPFDEKTLRELYRWMKIAWVIFVVIVLVTFILWPMPLYRNYIFSKSFFSGWVSVAIVWQFFAFSAVVIYPLYDGRYEIDKGARE

SEQ ID NO: 108 - protein, 677 aa, Aspergillus_niger
MSEIQARAAGASVQPPLSQAVGYVIVVVLGLIIAAVMMVITKILKKTTGEDNKKTEMFMTANRTVRTGLTASAVISSWLWTTAMLGASFVGYDYGVAGPFWFAAGCSPMIVFFALIGISYKRKIPDAHTSLEVVRIRYGRIAHAVFMTLCLINNIFACANMLLGAAAVISAITGMHIIAATFLLPVGVTVYTFVGGIKATFLTDYFHTAIILIIACYLSVKAFTFEEVGSIGKLYELVQAAAQRHPVSGNQDGTYLTMTSKGAILFGILHICSNFGLVIMDTSYFIKAFSAAPSSVVPGYTIGGIAYFAIPWALGTIMSSLALGLENTASFPTYPRRMTSTEVSNGLVLPYAAMTIAGKGGAAAVLLITFMAVTSTLSAQVIAVSSILSFDVYREYINRAASDRDIIRASHFGVIFFAAFSAGFSTMLHYVGIDLGWTLYMLGVVTCPGIFPMAFTILWRRQSRAAAILSPILGMATGIGVWLGTAQHFYGAVSVSSTGQILPCVYGTVASAFSPIVYSVLITLVKPQRYDWAEFRKEKLGLERLDSDSDITVNGQGSEEQQNRTSFDPQELKRWGRIAAFWSIATFLGHWVLWPLPMYGSKYVFGKGFFTAWVIVGIIWLWITMLVAIFYPLLDGGMQQMLQISRALRGRREAVTSTSLPSVNNDSPEVFRVNEKS

SEQ ID NO: 109 - protein, 680 aa, Schizophyllum_commune
MSSAETVLPQGAGYGVGIGLFFSAFMLALTAMQARYTPWSPKSAEEFSSASRSVKPALIASGIVSAWTWAATLLQSSAVAFKYGISGPWWYAAGATIQILLFAMLAAKLKLNAPYAHTWLEIIGARWGTVAHLVFLFFGLATNIIVSAMLILGGSATVTDLTGMNTLAACFLIPVGVAVYVVVGGMRSTLLCDYTHTTALFIIILFFVFTVYVTSPKIGSPARMHELLSIAPPVAGNAEGSYLTMRSKNGLIFGVINIIGNFATVFQDQAYWQRAIASRPASAVRAYLLGGIAWFSIPFTLATTLGLAARALGGSEDATWRDPDMKPLSAADVSAGLPAAAASAALRGPGGAAAMLILLFLAVTSATSAELIAVSSIGTYDIYKRYINPKATDEQLLRVGHFVVGAYAIACGFFGLIFYYIGVSMGWLYTFMGVLLGGAVCPIAIGVTWKKANKTGCIVGALIGLVAGLGTWLGTTARLWDGVINVTTSGGDYEMLAGNLASIGVGAIVSVAWSLISPDDFDFEITRAINRPTEYDTAERPQPERALSDEKTSPSDEKGAQATVKTTEPSDNDSTADDDLNPEGLKRAFRFAAWASLALLVILVLAIPLPLFFAQTIFGVRGLAAWVGIGIAWTFLAAGVVVIGPVWESREAMGMIMRGMVKDIFTRGGGKFAHKQAAAA

SEQ ID NO: 110 - protein, 695 aa, Ustilago_maydis
MAADSIPPPLSQGVGYGVVLGFGFAFAGVMFYITQLLWRFNGENNSHFETYATAGRKVGTGLTATAVFSSWAWSTALLSSSVVVFSFGVGGSYWFAAGCLVQISAFALLAIQSKLKTPHAHTVLEVVKVRYGTAAHWLYMFFCLANNLIAIANMLLGASATVSALTGMHIIASTFLLPVGVCLYTISGGLKATFLTDWMHSVALLIIVLFLTLKTITNDAVQSPGHLWELVKQHNVDNPIAGNYRGSALTMTSKSAVEFGVLHTLGNFGLVALDSSYWQKAYSADISAAVPGYVLGGVLYFGLPWCLGTVMGLAGWSLQTNPIWPAYGRELSSTELSDGLPLAYTALAVAGKGGAVAVVILIFMAVTSTTSAQLIAVSSIISSDVYHTYIRPNASDKQVIRVSRAACIGFAIFASAFSTMLYYIGISLTWTLYFLGLITCPAMVTLPLTVLWKKQTWWAATVSPVVGMVAGIATWLATASSYGGGVLNVTTTGELLPCLWGTIVAAFVPAILSPLITLAFPQPVDFAWERFNEIKLIQDDSSRSSSTDDLAQEKLATTHAQRVADAHASKSVPYSDAERRFMNKQSAVAGWTGLALFIAVWVLWPFIMYAAKYEFSRPFFVGWVVVAVIWAFAALLIFTFLPLWQGKRLIVTIVRGVLTGKDDNAHDTVATTASSTTPIEQREPGASFTSTSSSA

SEQ ID NO: 111 - protein, 687 aa, Aspergillus_niger
MSHELRVLPPGAGYGIVIGIGGIFALFMLGISWLQNRYTQFSTHRAEEFNTASRSVKPGLISAGIVSSWTWSATLLTSSTFAYSYGVCGPMWYGAIGTLQILLFALIAVKIKANAPGAHTMPEIVLARHGKIAHLTYLYNGLATNMLVSACLVLGGAQVVAALTGMNVYAANFLIPAVVAAYVIVGGLRATFIADYTHTVILFIAILVFGFSVSATSDLIGSPGKLYDLLQEAPRNMPIDRNTDGSYLAFRSVGGLIFAVDIFVSGFSTVWLDQAYWQRAIASRPESSVKAYMLGGVAWYGIPFGFATAMGLGCAALTNNPAFPTYPNPLSASQVDAGLSAPATAITLLGKGGAVLMLILLFMAVTSSTSAELIAVSSLLTFDVYKTYIRPNTDSATLVRVSHWGIVIYAIILAAFCSILNAAGVSLTWLLTVLGVIVGGAAIPVGLILLWDRMSTVAAIAAPWIGFGLGIIVWFITSWKRSGGISVATTGDATNAVAGNLASFGVGTISAVLLSLIFPGKHRHDTSATNSITGVPVEPEETSTEASAKKDNDTAILTTMATPTDPTTQPKNDIIEYLETETIEPMDPALVKKAERFAWTANAIFIAIAVILVPFTLFGTRYVYNREFFTGWVVVSFIWVWASVLICVIYPVVESAGALRDISRGIWADTRAVLGRRKERLRTEQPV

SEQ ID NO: 112 - protein, 699 aa, Magnaporthe_oryzae
MAGGGGAASGAISPPLSQAYGYGIVVGLGFLFCFLMIFLTWVLKRYNNESQTSEMFNTAGRTVKSGLVASAVVSSWTWAATLLQSSGVAYRYGVSGPFWYASGATVQIILFATLAIELKKRAPNAHTVLEVIRARYDAGKLHEDISADFLKGRVTHCVYICFCLFTNILVTLMLIVGGSAVMTSLTGMSTEGACFLIPLSVVIYTTFGGIKATFLSDYVHTVIVNVIIIIFAFTAYSTGSKLGSPSVVYDRLVAAAASHPVDGNAQGSYLTMQSREGIVFFVINIVGNFGTVFMDNGYYNKAIAASPVHALPGYIIGGLAWFAIPWLCATTMGLSALALEGSPAFPTFPDRMLPADVTAGLVLPYAAVALLGQSGAICTLIMIFMAVASAFSSQLISVSSIVTYDIYQTYINPSAKGKNLIAVSHVSVCAYGIIMAGFSVGLHHAGISMGWLYLWMGVMISAAVIPATLTLFWKRQNKFAAAGAPILGLICALVAWTVTCAREFDGVLSIENLGSNSPMLAGNVVALLSPLVFVPVLTFAFGADDYNWASMAAIEQADDDKTSGTEGGELESGNDRPAFAVVAPEQDMAKLHRASRIAKWLTCLMSISFLVLWPMPMYGSGYVFSKPFFTGWVTVGMIWIFASTAAVGVFPLWEGRYSILRVAKGMLGMKTKSSGSDEPIEGVVAYESKADSEEKKRED

SEQ ID NO: 113 - protein, 696 aa, Aspergillus_terreus
MGDDLKVLPAGAGYGIVIGIGGVFAIFMLCLTWLQNRYTNFSTHRAEEFNTASRSIKPGLISAGIVSSWTWSATLLTSSTFAYSYGVCGPMWYGAMGTLQILLFALIAIKIKANAPGAHTMPEIVLARHGKIAHLTYLYNALATNMLVGACLVLGGAQVVEALTGMNVYVANFLIPAVVAAYVIAGGLRSTFIADYTHTVILFIAILVFGFLISATSDLVGSPAKLYELLQEASKNMPIERNTDGSYLAFHSVGGLIFAIDLFVAGFTTVWLDQAYWQRAIASRPETAVKAYMLGGIAWYGIPFGFATAMGLGCAALTNNPAFPTYPNPLSAEQVSAGLSAPATAIALLGKGGAVLMLILLFMAVTSSTSAELIAVSSLLTFDVYKTYFRPHADSATLVRVSHWGIVIFALVLAAFCCILNAVGLSLTWLLTVLGVIVGGASLPVGLILLWDRMSTVAAIASPWIGLACGIICWFITTWKRSGEISVEATGDGTNAVAGNLASFGVGIISAVILSLLFPKKHISTDPTHMERSNRILGVAVEPEKNETVDLPSKEGKESAPTDINEVAESPTREGAPPPKNEVVEFLESKQIEPMDPVLVKKAERIAWTANAIFILVAVILVPFTLFGTRYVYNQRFFTGWVVVSLMWIWASVLICVVYPVVESAGALRDITRGLWMDLRVTMGVRKPKVSDSQAA

SEQ ID NO: 114 - protein, 662 aa, Sclerotinia_sclerotiorum
MPIAPPLNSGWGYGIVLGLGALFAFGMILVTWILKRYNHELQTSEMFSTAGRTVKSGLVASAVVSSWTWAATLLQSSGVAYKYGVSGPFWYASGATVQILLFATIAIELKRRAPNAHTFLEIIKARYGVLAHIVFTIFACFLLPLGVVMYTMFGGIKATFLTDWVHTFMLLIIILIFAFSAYATSDVLGSPKAVFDLLIKAAAEHPVEGNSGGSYLTMKSSEGAIFFVINIVGNFGTVFLDNGYYNKAIAASPVHALPGYIMGGVSWFAIPWLCATTMGLAAIALEGNPVFPTYPNRMDPADVSAGLVLPYAAVALLGSGGAVCTLLIVFMAVTSASSAELIAVSSIFTYDIYQTYFNPGASGKRLIYMSHAMVIGFGLFMAAFSTGLYYAGISMGYLYLMMGVIISSAVIPATLTIMWAGHNKWAATLTPPLGLICAVIAWLVTAKKQCGTLDVDCTGSNNPMLAGNVTALLSPLIFTPLFTLIFGWDKYDWKSMAEIRRGDDHDLAEEADVDLELVPGETHASAAEEALEQIKLLRASKIAKAMTVILTLALLILWPMPMYGSGYVFSEKFFTGWVVVGIIWLIGSTLTVGVYPVFEGRHSLARTAKAIYLDITGKQHPSRHHRPEATYVEGVKEDGVETPPTERSSEKDIASKSGVTAQ

SEQ ID NO: 115 - protein, 698 aa, Kluyveromyces_lactis
MSSADEVNISLLTKASGYGVLIGVGALFAVGIIVATKLMGKYLHEDSQSTENFMVANRNVGIGLTGSVVFSSWYWATEILWVVTMVYSYGVMSSFWYFAGLSVQICLMALLGIQAKKKIPNGHTCLEIVELRYGKSAHILYMFMCLVNNLLSSSSMILGSAAAISIISGNLHIVASTMLIPFGVMCYTVVGGLKATFLTDYMHSLIALIILVYFNTAVISSDKIGGISGLYDKVIQHEGDRYIEGNYQGSFLTGKSQGAIFFGIIHCVGDFGLTVMDSSFWQKAFSANVKASVPGYLIAAALIPAIVWPLGTIIGLSNIVLEGESFFPTYPRAMTSYEINNGFGLPYTLMAVLGKSSLGGLLLAIYLAVTSTVSAQMIAVSSIISFDIYRNYFKPNANNSQLITVSHIGVIFFGLFAAGFTVMLHYVGVDMTWMGYFYSMIICPGVIPLVLTILWDRQTPLAAIISPVIGFLAGIAVWLGTAYKFYGEVTITSTGSQLPCMYGGLTALFLPGVLTVPISLLDKNYKFDWSDFKKAKLIVEEEEEEEDSFDDNNRFKEATPSIEEKSSKSIKPSVELETKTENAVEILKEDSAFYETEVSSNPANTPFTAEEVRIINIYTKIAAGASVFVLLITWVVWPLPLYRDYIFSKTFFAGWTVVSIIWVYLALIFIGLYPLWDGRHSLIKIFNGVKNDIFKSKN

SEQ ID NO: 116 - protein, 653 aa, Nectria_haematococca
MALSHRSDETPEIPSPLPQSVGYGVVVAAGLAFAFGMIGVTAILKKTLHEDNSKAETFMVANRRVRTGLVASAVVSSWLWSTALLSCVFVTYSYGISGAFWYGAGCSTIIVFFGYLGVVCKSRIPEAHTILEVIRIRYGTVAHLSFTFLAVVNNLLNTINMILGASAAISFLTGMHIMASTFLLPLGVVLYTLVGGIKATFLTDYIHTFIILILCCWLTAKVIASEYVGSIGGLYDLVVAAQESHVIEGNYKGSLLTMTSQQGIFFAIILLVSNFGAVVMDTGYFLKAFAASPKAVVPGYVVGGISYFSVPWCLGTVVGMASLGLEALPIFPTYPRAMTPAEVTNGLALPYVAVAVAGKGGAVAVLLMTFMAVTSTLSAQIIAVSSILTFDIYRVYFNRESSNEQVIRWGHIGVVLFGVVAAAFTAMFHYIGVDMGWTLYMLGVLTCPGVIPVIFTIIWRKQSKIAVVTSAFLGMGTGLGVWLGTAYAFSGEVSVASTGGTLPCMYGTVASLFSPMLYSIVISLIRPDNYDWNDFKEEKLVIDSDENDQQQSSQDKSVTSSSTIEIPQDDTQRRWARYALWWAIATFLGHWVLWPLPMYAANYVFSKTFFTAWTVVSLIWLWWTLLAVGFYPIWDGREQIKAVVRNIWKLWRS

SEQ ID NO: 117 - protein, 687 aa, Neosartorya_fischeri
MASSRAQNAEVVVQPPLPQVVGYLIVVVLGLIIALGMSMLLDQERQLTGAVMMVITKILKRTAGEDNKRTEMFMTANRTVRTGLTASAVISSWLWSTAMLGSAFVGYDYGVSGPFWFAAGCSPMIVFFALLGISCKRKIPEAHTSLEVVRIRYGRIAHVVFMTLCLINNIFACANMLLGAAAVIAALTGVHIVAATFLLPVGVTVYTFVGGIKATFLTDYFHTAVILTIACYFSIKAFTVEEVGSIGNLYELVKSASERHPVSGNHAATYLTMTSKGGILFGILHICSNFGLVIMDTSFFIKAFSAAPSAVVPGYTIGGIAYFAIPWALGTIMSSVALGLENKPTFPTYPRRMTSTEVSNGLVLPYAAMAIAGKGGAAAILLITFMAVTSTLSAQVIAVSSILSFDVYREYFHQKASDRQIIRASHFGVIFFAAFSAGFSIMLHYVGIDLGWTLYMLGVVTCPGIFPMAFTILWRQQNKVAAILSPVLGLATGLGVWLGTAKHFYGAVTVSTTGQILPCVYGTVASAFSPIVYSVILTFLRPQNYDWAEFKKEKLALEELGGDLTTVHSQSSKALAPNAKEMKRWGRIAAFWSIATFLGHWVLWPLPMYGAKYVFGKTFFVAWVVVAVIWLWATMLVAIVYPIIDGGVQQMTQVYQGLTKGEESTSTPVESSTPSYSSILEKEQVKA

SEQ ID NO: 118 - protein, 680 aa, Aspergillus_clavatus
MTELQVLPPGAGYGIVIGIGGVFALFMLGLTWLQNRYTAFSTHQSEEFNTASRSIKPGLISAGIVSSWTWSATLLTSSTFAYTYGVCGPMWYGAVGTLQILLFSLIAIKIKAHAPGAHTMPEIVRARHGTAAHLTYLYNGLATNMLVGACLVLGGAQVVAAMTGMNVYAATFLIPAVVVAYVIAGGLRSTFIADYTHTVILLVAILVFGLSVAASSDLVGSPRKLYELLQQASREMPIERNTEGSYLAFRSVGGLIFAVDIFVAGFTTVWLDQAYWQRAIASRPETSVKAYLLGGIAWYGIPFGFATAMGLGCAALTNNPAFPTYPHPLSPEQVAAGLSAPATAITLLGKGGAVLMLILLFMAVTSSTSAELIAVSSLLTFDVYKTYFRPHTDSATLVRVSHWAIVLYAVLLAAFCSVLNAVGLSLTWVLTVLGVIVGGAAMPAGLVLLWGRMSTVAAVVAPWIGFVCGVVVWFVTSSLRSGAINVETTGDVTNAMAGNLASFGTGAISAVVLSLIFPKKSPSAEAAEVFPRVDGAVVVVVNPPESETSSRKDDEDQKEVPHPAAHEATQAAESGNIELMDPKVVRKAERLAQGANLVFILVAVVLVPFTLFGSSYVYSERFFTGWVVVSLVWIWASVIICVVWPVVESAGALGNISGGLWMDMRALMGVRKKNLQQGPA

SEQ ID NO: 119 - protein, 680 aa, Neosartorya_fischeri
MAHSNDLQILPPSAGYGIVIGIGGIFALFMLGLTWLQNRYTTFSTQQAEEFNTASRSVKPGLISAGIVSSWTWSATLLTSSTFAYSYGVCGPMWYAAMGTLQILLFGLIAIKIKAHAPGAHTMPEIVRARHGTVAHLTYLYNGLATNMLVGACLVLGGAQVVAALTGMNVYAATFLIPAVVAAYVIAGGLRSTFIADYTHTVILFVAILVFGFLVAARSELIGSPGRLYDLLQEASREMPIARNTDGSYLAFRSVGGLVFAIDIFVSGFTTVWLDQAYWQRAIASRPETSVKAYLLGGIAWYGIPFGFATAMGLGCAALTNNPAFPTYPHPLSSDQVAAGLSAPATAITLLGKGGAVLMLILLFMAVTSSTSAELIAVSSLLTFDVYKTYFRPHTDSASLVRVSHWAIALYALVLSAFCSILNAVGLSLTWVLTVLGVIVGGAAVPVGLILLWRRMSTVAAIVAPWLGFVCGIVVWFVTSMKRSGAINVETTGDGTNAVAGNLASFGVGIVSAVLLSYLFPEKYPCVDAQVAPGIEGVAPTPQEDTVQPPKAADGYEKETSAPAKNEIVEFLQDRQIEPMDPMLVHKAERLAQGASIVFILIAVILVPFTLFGTSYVYSKPFFTGWVVVSLIWIWASVIICVVYPVVESAGALGDISRGLWMDIKALTGVKKKSLQTNTV

SEQ ID NO: 120 - protein, 769 aa, Pichia_pastoris
MTEFILTQGFGYGIALGLGAAFALLMMATTYTAKKFLGQKQDSERFTTASRSVKQGLISSCVVSSWTWPGTLLTSSQWAYQYGVVGSYWYAAMGSFQVLLFTLVAIEIKKRCPGIHTIAEVARVRFGRGGHLVYLSYCLGTNVIVSCMLLLGGSQGFSFSTGMHIVAACFLLPMGVCVYTLFGGLQATFLSDWTHTVIIYVIILVCLTTVYGTSDLIGSPGKMYDLLTEIAKESPSSAANGSYLTFDNRAMIFTAWNLLMGGASTVFGDPSYSQKAIAASAKDVMFGYITGGLCWQIIPWGLGTCTGLAALALTNNPASYTYPNALTVEEAEKGLPLVYGMAAIFGKSGAAAAVVMIFMSVTSAMSAELISCSSILTYDFYRSYVNPKASGKQLVTASHIFVIAFSIFMGGLAVVFNYIGVTIGWILNFIGIALGPVLGALLGMLFYPKMTKHAMWFGPTMATLTGVACWLGSCHHFYGELNKDNLAGNYPSAIGNFVSVFTSPLYIFLISLIKPQSFDLSTLNDQFEAGDDAEETELERMKVQETDLDQLNKSLIQTRIFLIIHASIFVFILPLSLYGSGYIFSKRFFTAWVVITIIWEYLAAMWIIIWPLYESRVTLRYVIMKLLGKEGHLYYGAGEVKEISTSDQSFATPSVAEAKNEHHVNVITDSDHDISCSKSRQTVPPKIQIVPLEISTSTNTTKMDTKTPVTLAKVIKVLGRTGSRGGVTQVRVEFLDDSSRTIVRNVKGPVRENDILCLMESEREARRLR

SEQ ID NO: 121 - protein, 707 aa, Chaetomium_globosum
MDHAPSNKDHIANAALGQGVGYGIVVGLGGAFALVDAYTKPGMMLVTFILRRYNQELQTSEMFNTAGRTVKSGLVSAAVVSSWTWAATLLQSTGVCYRYGVSGPFWYASGATVQILLFATLAIELKRRAPNAHTYLEIIKARYGTFAHLVFLIFGLATNILVSLMLIVGGSATVNALTGMHTIAASRSRLPASESSKHMADDVVYLLPVGVVVYTMVGGLKATILTDWAHTFILLIILIIFSLTAYASHDVLGSPGVVYDLLVKAAARHPVEGNKDGSYLTMQSREGAIFFVINIVGYYNKAIAASPVHALPGYLIGGLCWFAIPWLTATTMGLTALAMEDKPGFPTYPDRMADADVTAGLVLPYAAVSLLGKGGAVGTLLIVFMAVTSATSSQLIAVSTICTYDLYRTYFNPTASGKRLIYTSHAVVVGYGLFIATFSVGLWYAGISMGYLYLMMGVIISAAVLPATLTLVWAGQNKWAASLSPIVGLACALIAWLVTAKRECGNLGVACTGSNYPMLAGNVAALLSPVVLVVIFTLIFGIDKYDWKSMMEIRRGDDHELTDPVGLSVEEVPVNHNESGAEFDEEQKKLERASKISKTATIVMTLAFLVLWPMPMYGTGYIFSKPFFTGWVTVGIIWIFCSFIGVGLFPIFESRKTLARTFKSIYLDVTGKSHPKTIHAQMAQEEQTPSEATPSEKSGVKQVVKPA

SEQ ID NO: 122 - protein, 688 aa, Ustilago_maydis
MVASTRVLPEGAGWAVVCGLGFFFAAFMIVLSFIQQRYTNRSIKDTDEFASASRSVKPGLVAAGICSAWTWSSTLLQSTAVTYRLGVSGGYWYAGGATIQILLCSIMACMIKLNAPFCSTFLEVLRVRWGKTLHCVFLFFALATNLLVSSQLVVGGSAVAGTLTGIPVLAAIWLIPLGVACYVLVGGMRATLLADYTHTVGLLIIIFFFFFKVWVTSPEIGSVSKMVTLLQASNDIPHNASSSPLTFLSQSGLVFGIINVIGNLGTVFCDQSYHQRSIASNPATAARAFLLGGSAWFAIPFLFSMTMGLSARALMYSGNPLMPLLTEADVTAGLAAPASGVALAGKGGAVAVLIILFLAVTSASSAQQVAVASVLTFDVYKPYIRPEATKREIFLMSHAGVIIWALVMSLFGTIFHYAGISLGWLYLAQGIIIAPAVVPIFCGLVWKRTNKTACLVGMIVGVISGVITWIVTAATLEGEVTVASTGKDYPTLAGNVVSLFMSAIITLIGSLMRPETEDHFVLTRAINAPEDVVERMNANSKRSSSGSPASPSTPFEEKTAFDSEKTAPSVGAVPYTTETIDYVKAAGLDANELRKTLRLTSWISVIASFVLCVLIPACLASRRVWNATGLAAYIWIGFIWLVWTTLAVGVLPIWESRHELAAILRGIGKDLSGKNGKYEETSEKAALS

SEQ ID NO: 123 - protein, 668 aa, Scheffersomyces_stipitis
MSSASQSVELLGQGAGYGILVGVGALFAGGMILTTKLLQRYLHENSNSTETFAVANRSVGTFLSASAVYSSWSWATELLWTSTMVYNYGIQASYYYGAGLAVQIAVMSVIGIHAKKKAPSAHTSLEIVELRYGRVGHILYLFLGLANNLLSCASMILGASGAISIIAGNLHPVASTMLIPFGVLLYTVVGGLKATFLTDFVHTLILLLVLCYLNTSVLTSDQIGGLDGLYNALVKKDGERYIEGNFDGSILTGKSKGALFFGLILTAGNFGLTVLDSSFWQKTFSASPRATVPAYLIACFFIFANVWPLGSIIGGASIVLEGTPGWPTYPREMTQYEIDSGFVLPYVLKQVLGNGGVGALLLVIYLAVTSTVSAQMISVSSILSFDIYKKYINPSAQNKQMIRISHISVVFFGLFCAAFSVMLHYVGVNMTWLGYFIPMIICPGVLPLIFTITWDRQTTLAVVAAPISGFIFGISIWLSTAYHYYGEVTITSTGGQLPALFGSLTSLFLPGVVSIVISLFSSQKFDWSQLQQADLIIADDTSIEEIVKNDGEVSSDINEKTSPVHTTVNDTGSKQEKPHQLSERELDFWIKISTGAAIFVLLITWVLWPLPLYRDWKFTRAYFKGYVTVSLIWLYSALIVIGIMPLYGGRHSIARIFKGIYRDFIKRS

SEQ ID NO: 124 - protein, 719 aa, Yarrowia_lipolytica
MALKHELPQGAGYGMVIGIGFVFAAGIVITMRIAKRYLNEHAQTSEMFMVANRSVGVGLTASAVFSSWMWATETLWGSVVGYNFGVSGPFWFSVGLAFHISLMCVVGIQVKLKAPNGHTMLEIVKFRYGVVGHVVFMALCLINNIMSCSWMILSAAAGIASLTGMHIVASCMLIPFGVILYTVAGGLRATFLTDYVHTVIALVLLIYFSLAILLHKEIGGIHQLYDMVIQYGESTKILGNYQGSLMTFKSEEAIYFAIVHTIGNLGLVIMDTAFWQKSLAANLEATVPGYMIGSICIFCVSWALGTICGLSARVIENLPIFPNYPNGFSAADIGNGLVLPYTVAALLGKGASAGIVIMLFMTVTSTTSAEMIAVSSIISFDLYRTYINPNASDRAIIAVSHAGVIFFGLFAAGFAVMLHYVGTDLNWLGYFLGIVITPGVFPAILTLLWKRQSRAAATLAPVLGLGTGMGLWLGTAKYYSGHISVETLGASLPNVWGNIGSMFGSLLYSVVITLLRPEDFDWAKFQKITLVNEDKIADSESHTEGELVNTEKGDESGTHTPEFPLDKNESSPETSIHEHSATIPTLTNENFFQPRLVIPPEIRGFKRFLWYIGWEVAPTDYSNHPLGQDALPIIFKWYKVAVIFSTTIFLITWVVWPFPMYRNWVWGKSFFTGWVVVAIFWNFLAFVCVCIFPLWNGRHTLYKVFNGLYQDIFHRKRKE

SEQ ID NO: 125 - protein, 671 aa, Candida_albicans
MSESSVHLLNQAAGYGVLIGVGALFAGGMILTTFLLQKYLHENANSTETFSVANRSVGTFLSASAVYSSWSWSTEFLFVSSMTYNYGVQAGYYYGAGLAIQIAVMSVIGIHAKKRIPTAHTSLEAVQLRYGKAAHLLYLVLSLICNICSCSAMILACASGISIIAGNLHIVASTMLIPFGVLLYTVVGGLKATFLTDFVHTTVLLVVLCYINTAVLTSDQVGGIDGLYDKIIEVSKTKFIEGNYDGSILTGKSKGSVIFGLVLTAGNFGLTVMDSSFWQKTFSASPRATVPAYLLTAFLIFSNVWPISAIIGGSSHFLESDPSFPTYPRKMTQYEIDSGFVLPYVLKAILGNGGVGALLLILYLAVTSTVSAQMVSVSSIVSFDIYKKYIHPNAQNKSMINVSHITCVVFGLGIAGFSIMLHYVGVNMTWFGYFIPMAICPGVIPLIFTVTRDRQTFWAAFISPIVGFAAGLAVWISTAYHFYGSVTIESTGGQLPALYGSLTALLLPGTLSIIISFIKPEKFDWEKLKQVNLLVDGDSSSEVEIDNDTPTIPKEKQDGVEVNFESDETSSLEQQQQSQAASQLTVKEMDFWIKISTGSVIFILLVTWVIWPMSVYRDWVFTASYFKGYVTVALIWLYTTLIVIGLVPFYTGRHSAAKVFRGVYNDYIKRK

SEQ ID NO: 126 - protein, 691 aa, Laccaria_bicolor
MPDTILPQGAGYGVVVGIGLFFSAFMIFLTAIQARYTAFSPKSSEEFTSASRSVKPGLIASGIVSAWTWAATLLQSSAVAYKFGISGPWWYGAGATVQILLFAMLAAKLKLNAPYAHTWLEIVGVRWGKTAHLVFMFFGLATNIIVSSMLILGGSATVTDLTGMNTIAACFLIPLGVAIYVVVGGMRSTLLCDYTHTTVLFAIILTFVFTVYSTSNKIGSPAKMHELLTAASAATPIPGNAHGSYITMRSKNGLIFGVINIIGNFATVFQDQAYWQRAIASRPASTVKAYLLGGLAWFAIPFTFATTLGLAAVALRGDPAMKVLTPADVSAGLPAAAAAAALLGKAGAAAILVLLFLAVTSATSAELIAVSSILTYDVYKTYINPNATEEQILKVGHAAVCVWCKPFSSSTEFSQVALYAVVCGLAGLIFFYIGVSMGWLYTFMGVILGSAVVPIALCITWSKANKWGCIGGSIAGFVAGIVAWLVTTSTLNNGVINVVTSGGDYEMLAGNLASIGVGAIVATLSSLIWPDKYDWESTRAINKPAQATSKRTEELKADSDSEKKEHEVVTKAGSIAGESFDAAEEADELDPVALNKAFKFATYSSVGLFIVLIILVPLPLFFSHYVYTTAGLTGWVAVGIAWTFCSAITVVIYPLYESRHAILLITKGIFKDLFARGSGKYVADPGPTSAA

SEQ ID NO: 127 - protein, 679 aa, Scheffersomyces_stipitis
MSQSVELLGQGAGYGILVGVGALFAGGMILTTKLLQKYLNENAHSTETFSVANRSVGTFLSASAVYSSWSWATELLWVSTMVYSYGIQASYYYGAGLAVQIAVMSLIGIHAKKKVPTAHTSLEIVELRYGRANHLLYLFLALANNLLSCSSMILGASGAISIIAGNLHPVASTMLIPFGVLLYTVVGGLKATFLTDFVHTLILLLILCYLNTSVLTSDQIGGLDGLYDLLVKKDGERYIAGNYDGSILTGKSQGALFFGLILTCGNFGLTVLDSSFWQKTFSASPKATVPAYLIAAFFIFANVWPLGSIIGGAAIVLDGTPGWPTYPRALTQYEIDSGFVLPYVLKQVLGNGAVGALLLIIYLAVTSTVSAQMISVSSILSFDIYKKYINPRAQNKHMIRISHIGVVFFGLFCAAFSVMLHYVGVNMTWYGYFYPLIICPGVIPLIFTITWDRQTALAVFVAPIFGLVFGITIWLTTAYHYYGKITIVSTGGQLPALFGSLTALLLPGIVSIIVSLAYPSKFDWKKLQEADLLITQEEDKPDSESNGEYSDEVNEKREHTHTTINETGSKEELSSKELDEKLIGEELELHQLTERELDFWIKIATGAAIFILLITWVLWPLPLYRNWKFSRAYFKGYVTVSLIWLYGAFIVIGLVPLVAGRKSFYKVFNGVYRDYIKRD

SEQ ID NO: 128 - protein, 674 aa, Candida_albicans
MAENTVHLLTQGAGYGVLVGVGAVFAGGMILTTFLLQKYLYENANSTETFSVANRSVGTFLSASAVYSSWSWATEFLLVTSMTYNYGIQAGFYFGAGLAVQIAVMSVLGIHAKKKIPTAHTSLEAVQLRYGKAAHLLYLVLSLICNICSCSSMILACAANISIIAGNLHIVASTMLIPFGVLLYTVVGGLKATFLTDFIHTTILLIVLCYINTAVLTSEQVGGLNGLYDKIVEVSTTKYIEGNYDGAILTGKSQGSVMFGLILTICNFGLTVMDSSFWQKTFSASPRATVPAYLLTAFLIFSNVWPIGAIIGGASHFLENDPSFPTYPRKMTQEEIDSGFVLPYALKAILGNGGLGALLLIFYLAVTSTVSAQMVSVSSIVSFDIYKRYINPRAQNKSMINVSHITCVVFGLDIAGFSVMLHYVGVRMTWFGYFTPMMICPGILPLIFTVTWNRQTYWAAFISPLVGFVAGLAVWVSTAYHFYSEVTIESTGGQLPALYGSLTSMMLPGVLSIIISLVKPEKFDWDKLKTADLLIGEEEEEDGSPNIQPKNEEGDLNKEKQAGVEVNFESVDTSSLEQQQQKSSSQLTNKELDFWIKIATGAAIFVLLITWVIWPMSVYRDWIFTGTYFKGYVTVGLIWLYTTLIVIGLVPFYTGRHSAATVFRGLYNDYIKRK

SEQ ID NO: 129 - protein, 684 aa, Pichia_pastoris
MAVKELLNQASGYGVLVGVGALFAIMVLISTRLMKKYLNENTGNTEMFTVCNRSVGVGLASSAIMSSWMWATVSIWSVQMVFSYGVAAAYHYASTSSVQVVFLMLAGIECKRKIPNAHTCLEIVNLRYGKATHILYIFLCLVNNLLSCSSMILGASGAITALTGMHIVASTMLIPFGVLCYTFSGGLKGTFITEYVHTFIALIIFAYFTTASVAHNEIGSLGNLYDLVKQWQADNEYYIEGNYQGSLLTFKSQGAIIFGLIHSIGDFGLAVMDSAFWAKAFAAKTETMVPAYIIGSITIYACSWPLGTVMGLIGAYMSTKPSFPTYPNPMNADEIANAFLLPYTLKALLGNGACGALLLALYMAVTSTVSSQMVSVSSILSFDVYRTYINPEAQNKQMIKVTHFGVVFFGLFSAGFSVMLHYVGVSLTWMGYFYSMIICGGVIPLLLSILWSRQTTVAAFVAPIAGISTGIATWLSVAKTMYGDLSVASTGQQLPCLYGGLVTIFVPGIVTVLVSLLYKPYKFDWARLQDATLVEGEEDSSESEFEKDNLSHSDEDREIKGVVPEYTTEIGSIESPTDREKELVKIKFWLKVARIYLVINVLVTQVLWPMPLYRNWIWSRSFFEGWAGASIGSTYLAIVLVCIYPLWDGRHALKKVACGVYRDYIKRENKQENKHLVEPVIESK

SEQ ID NO: 130 - protein, 668 aa, Scheffersomyces_stipitis
MSDTDTVFLLPKGAGYGVLLGVGAVFAIGMILTTKFLQKYLNENATSTETFSVADRSVKRFLACSSVYASWSWADEILQTVSMIYNYGVQASFYYGAGLSVQMCVMALIGISAKKRAPQAHTSLEIVGLRYGKATHILFLFLCLVTNLISCSSMLLSASGAISIISGNLSIVASTLLIPFGVLLYTTFGGLKATFLTDYVHSFVLLLILIVINTKVLASKEIGGLNGLYSQLLEHSQDRYIEGNYQGSILTGKSQGSIIFGLVLTCGNFGLTVMDSSFWQKSFSAEVKATVPSYLGSAVLIFANTWPIGAIIGGASIILQGHPSFPTFPRKMTQFEIDSGFVLPYTVKAVLGNSGVGAVLLTVYLAVTSTSSAQMISVSSILSFDIYKKYINPQANNKQMIRVAHFGVVFFGLFAAGFTLMLHYVNVNMTWMGYFMSIVICPGVFPLIFTVTWDRQTTIAAFVAPITGLVFGFAVWITTTNKLYGEITIDTLGMQIPCLYASLTALFLPAVVSIILSLTVFPKKFDWKELSEAKLLIKATGSESESESESEGEKSAIKEKSTIENVQVFTVEEDLGVRAADPAELNFYSKVAKIGVVVGLLLTWVLWPLPLYRDWIWSAAYYKGYVVVGLIWLYVAFIIIGLAPIWEGRHAIKTVSNGIYRDYIKRSK

SEQ ID NO: 131 - protein, 871 aa, Grosmannia_clavigera
MSGLALGTKGVDLVSQGTGYGLLIGLGVVFCGVILVAVKIQRVYLSEDNATSEMFMVANRSVGTGLTASAVFSSWMWINETVFASAMCFRYGLAVPLWWATGLCFQIALMAALGVLAKIRVPYAHTSLEIIRMRYGKIGHVVFIVLNITNNVFGCASMILTGSQIIHGISGMHFVAATILIPLGVVLYTAVGGLKATFLTDYLHTTIALILIIYFTLSVLTHQAVGGLGGLYDIVTETASKNYIKGNFEGSLLTMKSKNAIIWGLILKFGNLALVVMDTAFWQKSFATEVGATVPGYDLAALAIFGIPWGLGTVIGLTARAIQYSPIFPTYPNPMSLAEVSAGFVMPYTIKALIGTHGIVAFFVLLFMALTSTVSSSMIAVSSILSFDVYKTYTNPRATDKTLVHVSHYAVIFHAVFITGISLALNYGGADMTWIGYFRPILSCPGIIPLALTLIWDRQTKLAAVLSPVLGFFTGLAIWLLTAYRLHGTINLITTEAGLPALYGACGSFFSPAIYSVVLSLYKPSRFDWREFLRIELADEAQIHADDTTGSDKTASSGDEAGNEKQAVARQSPVGAAELSLDDVRHPFDEATIKELYRWYKIAWVFWVVIVLVTFVAWPMPLYRNYIFTKPFFLGWVTVAIIWQFFAFFAVAVYPVYDGRGDIITGSLADWDITPAEWMRRNSHDDWNGLAVSVVVFDGGSSDGPRRVLLVQRAAHDSMPNRWEVPGGGASEPHESLLLAAARELWEEAGLVATRFKALVPLRAVEGVEGVDEVAALVAAADHPGHVFHNRTGTRLFGRFAFRADVQQTTAVVLDPNEHQDYVWATEEEVRLQRQIGQDSNDSRPLPLTHPATQAFILEAFRQAAEAEVDK

SEQ ID NO: 132 - protein, 675 aa, Aspergillus_clavatus
MTVATGHIHSVDLIPQGTAYGLLIGLGVLFCGVILIAIKIQKAYLCEDSGTSEMFMVANRSVGTGLTASAVFSSWMWINETVLSAAMCYRYGLAVPLWWGSGLCFQIALMAALGVMAKIRVPYAHTSLEIIRLRYGRIGHVVFIVLNLTNNVFGCSSMILTGSQLIYGVSGMNFVAATILMPLGVVLYTAVGGLKATFLTDFLHTTVALILIIYFTLTVLVHPAVGGLGGLYDQIRATAAENYIPGNFAGSLLTMKSRDAIIWGLILKFGNLALVIMDTAFWQKSFASEVHATVPAYNLAAVAVFGIPWGLGTVIGLSARALHDTPIFPTYPGTLTLAEINSGLVMPYLVQALIGPAGIVAFFILLFMALTSTVSSSMIAVSSILSFDLYKTYINPRASDRRLLHVSHLTTVVHAVFITGIAIALNYGGANMTWLGYFRPILSCPGIIPLGLTLFWSGQTRLAAILAPILGFATGLTIWLVSAQSLYGAVTMDTTGQGLPALYGAIGSFFSPALYSVVLSVFRPARFDWREFLRVELADADADNGQPVLPGDGDAEKKQPPAQVTPILPSSSQRALDDLQHPFSAETLQELWRWLRIAWVVFGVLVLVTFVLWPMPLYRDYIFSRSFFAGWTTVAILWQFFAFAAVVVYPLYDGRREIARGAKGVWNSWPSMQKG

SEQ ID NO: 133 - protein, 720 aa, Zygosaccharomyce_rouxii
MHPSLSQGVGYGVIVGLGAFFAVVMNIVTLIQNKFSRNKVGGADEFTAASRNVPLPLMIVSIVSTWCWSLTLLQSATESYSYGVSGGYLYAVGGAIQVSVFSIVASKVKANANLVTTFPEAGHLRFGTAGHLTYLWCGLSCNTIVSSVILLGGSAVFNAVTGMNSYAALYLLPMVCAVYVYFGGLRATFISDACHTFPLLVFLIIFTFVIYCGGSSKIGSPGKMWELLSEVAHHDPVDSNYHGSFLTFRSKDGGIFLFITIITGFGIVVLDQAYWSRAIASQSLKTSKAYFIGACCWFVIPWSMGLVLGLGARATSLMPGFPSLNSDEVTAGLSAVAGASFLLGKAGSTMILLMIFLSVTSAFSGELIATSTLLSYDVYKKYLKKDATPQQVLFASKVSVFLWAAFAGGIACVFQKIGISMGWLFNFYGCATSSGVFPVALTFTWSKLNKWGAVSGCLAGTAIALAVWLGTCKAIMGEINVDNLSDRWVSFAGNATALFSGGIISIVVSLIWPQEFDWNDIRNKSILTANEEKLIYEQGSGEVTELEEHHITNPKDQKAVEETGQHGQSFTSDSSKDDEGNGDDILKEEEREEYCDLEGSESLEEVEIIDVPQEENIPLTKLNKQFKVFSGLALAFAFAVSVCIPVPQIAAPYVYSKGFFTFVVIANIIWLFITFSVCVIWPLFETRKFIYGLFNRKKKIRNKLNLLLAEIVMVLRLESE

SEQ ID NO: 134 - protein, 682 aa, Aspergillus_terreus
MGEITSSGVTLISQGTGYGMLIGLGIIFCGVILVAVKIQKSYLDEDSGQSEMFMVANRTVGTGLTASAVFSSWMWINETVFAAVNCYRFGLAAPMWYGSGLCFQIALMAVLGVLAKIRVPYAHTSMEIIRMRYGRVTHVVFLVLNLFCNIFGCASMILAGSQLIHGISGMHFVAATVLIPLGVVLYTAVGGLKATFITDYLHTAVALILIIYFTLTILTHDAIGGLYGLYDKISAIAEDNYIPGNYQGSLLTMKSHDAIIWGLILKLGNLALVVMDTAFWQKSFATEVKATVPGYNLAAVAIFGVPWGLGTVIGLAARVLHTTPLFPTYPGEFTQQEVLSGFVMPYAIQAVVGEQGVIAFLVLLFMALTSTVSSSMIAVSSIISFDLYKTYINPKASDKRLIRVSHLAVVFHAVFITAFSIVLNYGGANMTWIGYFRPILTGSGIVPLILTLTWSGQTRLAAIWSPILGFVTGLAIWLGTTKSMYGSINLKTTMEEAPCLYGSLASTFTPAVYSVVISFYKPYKFDWRQFLRIELVQRPEAPANEGCPRENVTSEGYVNPDQKGAMVSSSSSTTDIQTPSETSLDDLQHPFDTHTLQQLHRWYRIAWIMWVVLVLLTFVVWPMPLYRDYIFDKSFFSGWTTVAIIWQFVAFVSVVLYPLYDGRYEIWKGVVGIQKSLRGMLG

SEQ ID NO: 135 - protein, 692 aa, Kluyveromyces_lactis
MEPVFSQGVGYGVVIGVGLFFAVVMNIVTYLQNRFFSNKSSQADEFTAASRNVPLGLMVVSIVSSWCWSLTLLQSATESYNYGISGSYFYAVGGLIQVSVFSIVASKVKANANLVTTFPEAGYLRFGNAGHLAFLWCGMVCNTIVSACILLGGAAVINAITGMNTYAALYLLPLVCAIYVYFGGLRATFISDALHTFPLLVFLIIFVFVIYGGGSSIIGSPGKMWDLLTEVANKNPVSDNYHGSFLTFRSKDGGIFLFISIITGFGLVVLDQAYWSRAIAAQPLKTSKAYFIGAVSWFVIPWTMGLCLGLAARATSILPGFPPLSDSEISSGLSAVAGASHLVGHAGTGMILLMIFLSVTSSFSGELIATSTLLSYDVYKKYIKQNATPHEVLLVSKIGVFFWAIFAGSIASIFHRIGISMGWLFNFLGCATASGVFPVALTFTWNRLNRWGAVSGSIGGMILAIIVWLVTCKCYLGEINVDNLANRWVSFAGNATALFMGGILSIGLSLIWPDDFDWNSIRNKTILTEHLDSDSSSSAAPSIVQEENSNEKELYEVKGGEPLNETFTHERDLDLPQEEEIPLAKLKRQFKVFSILSISFALTFAILIPVPQIAAPYVYSKKFFTFVIAVNIIWLFGTFFVCVILPLFESRRFLKKLFLHITGIKKGHFGPEPEPAVVETAVDESYVDVEKR

SEQ ID NO: 136 - protein, 668 aa, Candida_dubliniensis
MSDSAVHLLDQAAGYGVLVGVGALFAGGMILTTFLLQKYLHENANSTETFAVANRSVGTFLSASAVYSSWSWSTEFLLVSSMTYNYGIQAGYYYGAGLGIQIAVMSVIGIHAKKKIPTAHTSLEAIELRYGKSAHLLYLTLSLICNICSCSAMILACASGISIIAGNLHIVASTMLIPFGVLLYTVVGGLKATFLTDFVHSSILLIILCYLNTSVLTSEQVGGLNGLYEKLLKVSATKHIEGNYDGSILTGKSQGAAIFGLILTAGNFGLSIMDSSFWQKTFSARPRSTVPSYLITAFLICSNVWPLSAIIGGSSHFLETDPSFPTYPRKMNQYEVDSGFVLPYVLKATIGNGGVGALLLIFYLAVTSTVSAQMVSVSSIVTFDIYKRYFKPDAQNKSMIKVSHITCIVFGFGIAGFSIMLHYVGINMTWYTYFYPILICPGVIPIILTVTWNRQTFWAAFISPLAGFAAGLAVWLSTAYHFYGEVTIASTGGQLPALYSSLTALLLPGVLSIIISLIKPEKFDWDQLKKADLLVKSDDSTQEDLSSETEREKTEKNDQVEVNVDSDRNSSLEQQEHPTKLTEKELDFWIKIATGAAIFILLITWLIWPMSVYRDWIFTPTYFKGYVTVGLIWLYVTLIVIGVIPFYTGRHSMAKVFKGVYNDYIKKK

SEQ ID NO: 137 - protein, 761 aa, Yarrowia_lipolytica
MPFSEAPPLPQGAGYGILVGVGALFAVFIVFTLRVSLNYLGEKANKSEMFMVANRAVGVGLTASAVFSSWMWANETLYGAVVGYNFGMSGPFWFAAGLSFHIALMTVVGIQVKLKVPNGHTLLEIIKFRYGVPGHIVYMVFCLINNILSCSTMILAAAGAISAITGMHSAAASMLIPVGVILYTAAGGLKATFLTDYVHTTVALVLLMYFCIGILTNEHIGGVYGLYEKVLAYSDNADHYIKGNYQGSLLTFKSQGGALFSICHNIANLGLVIMDTAFWQKSMAADLKATVPGYMIGSVLIFCVPWALGTISGLGARVLEQSGIIDPISAHALDVGNVFPIVTHALLGKGASVGIVLMLFMSVTSTVSAEMIAVSSIISFDIFRTYIKPNASDRVLIFVSHAGVVFFGLLSGAIAVAFYFGGIDLNWMSYFLGIAITPGVFPVILTILWKRQSRLAALVSPILGLATGLGVWLGTAQVYFGEISVKSTGAPLPNVWGNIATLMSSLLFSVIITLIRPEDFDWLIFHNISKVNEDDEKPEDLEAIHENPTDPFFISDSDAPSTSKTNEVSEVIINHEIASSENDSENESDHGDPTKQTHDSSTHSLSSGSYHVAVVREAATSNGLFQPRLVIPQNISTWRKFLYYIGWDTAHTDYSNHPLGADSIPIMLYWYKVAKIFAVVICLITWIIWPYSLYRHYIFSKSFFSGWVIVAIIWVFLAFIFVVIFPLYDGRKSLYRVYDGLRTDWKKWRHRKDGQAEEEKE

SEQ ID NO: 138 - protein, 672 aa, Candida_dubliniensis
MVEDTVHLLNQAAGYGVLVGVGAVFAGGMILTTFLLQKYLHENANSTETFSVANRSVGTFLSASAVYSSWSWATEFLLVTSMTYNYGIQAGFYFGAGLAVQIAVMSVLGIHAKKKIPTAHTSLEAVQLRYGNAAHLLYLVLSLICNICSCSSMILACAANISIIAGNLHIVASTMLIPFGVLLYTVVGGLKATFLTDFVHTTVLLIVLCYINTAVLTSEQVGGLNGLYDKIVEVSTTKYIEGNYNGAILTGKSQGSVVFGLILTICNFGLTVMDSSFWQKTFSASPRATVPAYLLTAFLIFSNVWPIGVIIGGASHFLESDPSFPTYPRKMAQEEIDSGFVLPFVLKAILGNGGLGALLLILYLAVTSTVSAQMVSVSSIVSFDIYKRYMNPNAQNKSMIKVSHITCVVFGFGIAGFSVMLHYVGVRMTWFGYFTPMMICPGILPLIFTVTWNGQTYWAALISPLVGFVAGLVVWVSTAYHFYGEITIESTGGQLPALYGSLTSMMLPGILSITISLIKPEEFDWDKLKTADLLIEEEEGSSPNNGTKNKEDYLNKEKQAQVDIFFESDEASSLEQYQQKLTSQLTDKELDFWIKIATGASIFVLLITWVIWPMSLYQDWIFTGAYFKGYVTVGLIWLYTTLIVIGLAPFYTGRHSAARVFRGVYNDYIKRT

SEQ ID NO: 139 - protein, 682 aa, Debaryomyces_hansenii
MSGTEAIQLLNQSSGYGILVGVGALFAIGMILTTKLLEKYLHEDAKSTEVFMVANRSVGIPLLASSVYSSWTWATELLWVCTMVYNYGIMASYWYSAGLAVQICLMAVIGIEAKKKIPACHTSLEIVELRYGKACHLLFMFLSLTNNLLSCCSMIVGAAGAISIIAGNLHIVASTMLIPFGVLLYTTVGGLKATFLTDFVHSFILLIILCYVDTAIISSKEIGGLDGLYDLVLKHESDRYIEGNYNGSFLTGKSQGAIFFGIILTLGNFGLTVMDSSFWQKSFSANTKASLPGYLIAGFFIAANVWGLGSIVGLSSIVLEGTPTFPTYPRKMTPSEVSSGFVLPYTVKGLLGNGGVGAILLVIYLAVTSTVSAQMISVSSILSFDIYKKYIKPDAQNHQMIRVSHFGVIFFGLFAAGFSVMLHYVGVDMTWLGYFYSMIICPGVIPLVFTITWSRQTKLAAFISPIIGLVCGLVVWTTTASHYYNEVTVASLGGQLPCMFGGLTALFLPGIVSIVVSLTIRPHRFDWNQLRRAELIISEEDEHIPNQKIELDSSEESNGNKEIIDKASQKTNIRNRYDETDSDNVYDESLETEEQKNRLLTTYSKLGYAAFIFVLLITWVLWPLPLYRDWVWSRAYFKGYITVSLIWVYGALLVIGVYPLIDGRHSATKIIRGVYNDYLKRD

SEQ ID NO: 140 - protein, 659 aa, Candida_tropicalis
MSDQPVELLNQGAGYGVLVGVGSVFAIGMILTTILLRKYLHEDARSTETFSVANRSVGTFLSASAVYSSWSWATEFVMSTSQVYNYGIQAAYYFGAGLSIQIAVMSLVGIHAKKKIPTAHTSLEVVGARYGRSAHLLYLVLALICNIISSSAMVLTVASLISIIAGNLHIVASTMLVPFGVLLYTVVGGLKATFLTDFIHTTILLIILCYLNTSLLTSDQVGGLNEFWTSLTKVDRQIEGNYAGSIITGKSQGALIFGLVLTAGNFGLTVMDSAFWQKTFSATPKATVPAYLLTAVFIFSNVIPIGTIAGGIALTIEDNPSFPTYPRKMTDYEVASGYVLPYVLKSILGKGAVGSLLLVIYLAVTSTLSAQMVSVASICCFDIFKYQLGLKGSMIRVAHIGCVVFGFGISGFCILLHELGVTMTWVTYIYPIIICPGVIPLILTITWDRQTFWAAVLSPIIGLGSAIAVWLTTAKHYYGAININTLGSEFPSLYGSLTALILPGIVSVIISFIKPEKFNWEELQSLDLTIKDEVAESDPVSTSDSNSNSNGSPNEIDEEKKVALVEVKTQQLSSNELDFWIKIATGAVIFILLVTWVIWPMSLYQDWIFSAAYFKGYVTFSLIWLYATLIIIGFVPFYTGRYSVATVFKGLYNDYIKKK

SEQ ID NO: 141 - protein, 681 aa, Botryotinia_fuckeliana
MAVQLLTQADGYGIIVGLSILFCLIILAAVRIQKRYLSEDSDQSEMFMVANRSVGTGLTASAVFSSWMWINESVFSAAYTYKWGIALPIWWASGLSFQIALMAVLGIVAKLRVPYAHTSLEFIRMRYGNYAHWIFIVLNLINNIFGCGSMILAGAQLVTGMTGMHVVAACVLIPAGVVIYTAVGGLKATFLTDFLHTTVALILLIYFSLAVLSNEHIGGVSGLYEKVKATDDYISGNYEGSLLTMKSKSAVLFGLVLKFGNLALVLMDTGFWQKSFASEVHSTVPAYDLVSIVIIAIPWCTGTIIGLSARAIEKTPIWFDYPNTLTMTQVNSGMVMPYVLRSLLGKGATTGLLVLVFMAITSTVSSSMIAVSSIISLDFFRTYINPAASDRKTLKVSHWGVVFHGCFMAGFAIMLEYAGATNNWSTYFRPIIACPGILPMIFTLLWSRQTKLAAILSPILGLMSGVATWLSLSWYWSGALNIQTTQVQIPGLYGAIVSFFSPAIYSIVISLIWPSKFDWREFLRIGLIEDKSQTNSSLTSTIPSSEGVNQLTHAGDEKKTESYTTSGDEAGPPSPPSITPNSQLPLDDVVHPFGDETIKHINKWLKIASVFFVVNVLVTIVLWPIPLYRDWIFTKSFFSGWIVMAIIWHFFAILAVVIYPVWDGRLEIVTVLKGMKGEWKR

SEQ ID NO: 142 - protein, 640 aa, Aspergillus_niger
MAAVELVTQGTAYGLLIGLGVFFCGVILIAIKVQKAYLSEDSGTSEMFMVANRSVGTGLTASAVFSSWMWINETVLSAAMCYRYGLAVPLWWGSGLCFQIALMAALGVMAKIRVPYAHTSLEITRMRYGWIGHVIYMVLNLTNNVFGCASMILTGSQLINGVSGMNFVAATILIPLGVVLYTAVGGLKATFLTDFLHTTVALILIIYFTLSVLTHPEVGGLAGLYDKVVATASENYISGNFEGSLLTMKSKGAIIWGLILKFGNLALVVMDTAFWQKSFASEVNSTVPAYNLAAIAVFGIPWGLGTVIGLTARALHHTPLWPTYPIDITTTEVSKGMVMPYLVKALLGESGMIAFFVLLFMALTSTVSSSMIAVSSILSFDMYKTYINPQASDRRLLGVSHITVVFHAIFITGISIALNYGGANMTWIGYFRPILSCPGIIPLGLTLFWSRQTRLAAILSPVLGFFTGLAIWLATAKSMYGAVNMTTTGEELPALYGAIGSFFSPALYSVVISLYRPYTFDWREFLRIELADEAPTRATPAATQETKVEGVYISTDASPTSTPSRLSLDDVRHPFTEDTLRKLHRWSWIAWAMFVVLVLITFVLWPMPLYRDYIFTKSFFSGWTTVAIIWQFCAFFAVVV

SEQ ID NO: 143 - protein, 716 aa, Lodderomyces_elongisporus
MEPSLTQGAGYGLIVGGGAFFAIVMNYVTFLQNKYSAHNSKKVDEFVSGSRNVGFGLLLSGILSNWTWSLTLLESAVKSYDIGISGSYWYAIGGMLQVSVFSVVSSKIKKNANLVTTFPEMAYFRFGKAGHLSFLWCGFVCNSIVSSCILLGGSAVFHAVTGVSQYATLFLIPFGCAVYVSFGGLRATFISDATHTCIILVFIIVFTLEVYYGNDKIGSPRKLWEMLQSLPPVDDNYHGSYLTFRSQQGAIFSVISCITGFGLVVNDQAYLSRAVAADPRITSRAYFFASICWFVIPFAMGAGLGLGARALTVYPDFPKLSDFEVGEGLPPVACATYLMGKTGSAMILVMIFFSVTSSFSGELIGTSTLISYDIYKRYYKPDAKPNQVVRVAKISVFGWAIFSSCLASIFYGAAKISMGWLFNFLGCATAAGVFPIALSFVWKDLNKVGAVGGSIGGMVLAIMAWLIACYKLTGEITVTNLSLQWVSFTGNAVALAFGGIISITASLISPANFDFEKTRNRTSLMPKSKEMEIVENSSSDGELVLGKIESKVESAEKREREKNAAVVMVDVVLLKDVKNEAESKSIEKARSKANDNKNDSEIEQDLVDIESSTSNSELDMNLDAVIDHKHLDHQFKKYCGLVALAVLILVFVIPVPLGASPYIFSPHFLEGVVIIIIIWLFCSLFYVVILPIVEARKSIWRIFKASVLFRKDKSQE

SEQ ID NO: 144 - protein, 683 aa, Pichia_pastoris
MSDAETTVHLLGKSVGYGVLIGVGAAFALAVVIATRLIARYLNENNNSTETFMVSNRTVGIGLTTSAIFSSWFWATELLWTVTMTQFYGVSVGFYYYWGLIVPVSIMGVLGIEAKRKVPKGHTCLEVVELRYGKAAHILYMCFCLANNLLSCAAMILGAAGAISIIADNLSIVASSLLIPFGVLCYTFSGGLRATFLGDWGHSVIAIIVLLYVNTAALVKIGSIDKLYELIFTGPNEGTIEGNYDGSLMTFRSQGAVFFGIIHLLGDMGLTVLDSSFYQKAFSANLKSGVPSYMIGGVCIMAITWPLGTIIGMATTFLENDPSFPTYPRKMTTFEIESGFGLPYTLKALLGDGACGAILLVIYLACTSTVSAQMISVSSILSFDVYKTYINPQAKNKQMIRASHITVVFFSFFAAGFAIMLHYVGANMTWVGYFYPILICNPVCPMILLFTWDRQTKFAFIASPIIGIGASVGVWLGTAYHYYGEITMETTSRQLPCLWAGLTALFLPLVLTVTFSLFQKEHFDWNVFKKAELIEMEGSEASSPSEVDVVYESGSVSSPTEDSEKRSVDKSENVQLQETELGVSSGDEYDEEEQKLIKRYIKIAYAWCILVVLVTSVLFPMSLYRNWIISLSFFRGYTGLSMFWLYGVFLVIAVYPLYDGRHSLGRIGQGLWKDFKRIFKSKR

SEQ ID NO: 145 - protein, 693 aa, Aspergillus_oryzae
MSETANFVAPLSQGFGYGIIVGLGFAFALVMVFITWALKRYQYEVQTSEMFSTAGRSVKSGLVAAAVVSSWTWAATLLQSSAVAYQYGISGPFFYASGACVQIILFATLAIELKRRAPNAHTFLEVIRARYGTAVHVVFIVFCLMTNILVTAMLLTGGSAVLTSLTGVNTVAACFLLPIGVVLYTLFGGIKATFITDYMHTVVIIVVIFIYAFSAYATNDTLGSPSRVYDALVAAADRHPVEGNAQGSYLTMRSKEGGIFWVINLVGNFGCVDVLLKLSQYVLTVCFRTVFLDNGYYNKAIAAHPVHAFPGYVIGGLCWFAIPWLCASTMGISALALEGTQRMSSEDVTAGLVLPFAAVKLLGYSGAVCTTLMIFMAVTSAFSAQLIAVSSILTYDIYQAYINPSAKGKRLVWVSHMSCIFWATAMAGFATGLYYAGIGMGYLYLLMGVIISSAVFPGAMTLVWKGQNWVAAAASPILGLAVSLIAWLVTAKKESGVLTVTTTGANYPMLAGNVAALLSPIIFSPVLTYIFGPQNYDYESMRAIRKVDDTDVAAAAHVDIELIPGENSPATINAAKDQEEERKLNRAALYSRTLTIGMVLCFLLLWPIPMYGSSYVFSKKFFTGWVVVGIIWLFCTTVGVVIFPLYEGRESIIRTARLMALDAVGKKPRFEGQEQASSGAATPMEKVGAKSDV

SEQ ID NO: 146 - protein, 825 aa, Leptosphaeria_maculans
MDPVDQHWPHHINIRGRVGPKQTPGDRRLLVAFLSTLNQEAYLCDSMRTHCGTLEACIAWHLQLRYRTAISIVTDLALNATLGRLGCENQDIDFFFAWELEMADTAVTPLPVGAGYGVVVGIGFFFAFLMMGISYLQNRYTQYSTHQSEEFNTASRSVKPGLIASGIVSAWTWAVSIRNREHKEYAADFSKATLLQSSTVAYTYGIAGSYWYAAGATTDGALKVQILMFAILACKVKQNAPRCHTYLEIVKARYGTAAHLVFMVFAFITNILVGSQLLLGGSAVVTSLTGMPVYAAIFLIPVGKREAWRTRTAPILTKKIGVCAYVMLGGLRATFLCDYSHTLILMIIILYFMFNTYAVNPLIGSPGNMYDLLVRAGSQRPIEGNQDGSYLTLKSNYGLIFGVIQLCSGSGTVFLDQAYWQRAIASKPSTAVRAYLLGGIAWFAIPFGFATTLGLAAAALTDNPRFPTYPDLPTPGQISSGLASAFAAETLLGQGGAVALLVVLFMAVTSCASAELIAVSSLLTFDVYKEYIQPKATPKQLIFVSHIMICVFGLIMSVFACIWNALSIDLGWLFLVMGLLIGGAVFPTAFTIVWRKQTKAGAISGCLTGLAAGLTAWLATAKVYYGVIDVETTGKSYPTLAGNVAAITTGLIVTLTISMLKPDDFDWELTRAINAIVVDGTQDHGTTTRANSSSPELSDLTEKKGFQNTISTTTTNTPPPPAELPAHLAPTADEGEDDPRTLRSAFKLACIFAFVLTFILDFLLPMPMFFSHYVFSRGFFTAWVIISFIWVFVSSAISCLLPVWETRLSFVKLFHRMVGRGVDGV

SEQ ID NO: 147 - protein, 654 aa, Glomerella_graminicola
MDSTPVLNQGWGYGLMIGLGILFAVFMIIITWALKRYNSELQTSEMFTTAGRSLKSGLVASSVLSTWTWAATLLQSTAVAYKYGVSGPVWYASGATVQIILFATLAIELKRRAPNAHTFLEVVKARYGPITHGVYIVFCCFCNILVTAMLLTGGSAVIQNLTGAPVAASVFLFPIGVVVYTLFGGIKATFITDYINGLVILVIIFVFAFTVYSTNELLGSPGRVWEILTELAAKRPLSGNSGGSYLTMRSQGGAIAASPIDALPGYVMGGISWFAVPWLTATTMGLAGLALETYDVWPTYPNRFSPADVDAGLVLPTAAVALLGKGGAVATLILAFMAIMSTYSSELIAVSSICTYDIYKTYFNPSATGKQLMRINYIGMGIFALFMAGFATGLNYVGISMGYLYLMMGVIISSAVLPATLTLLWSGQSWAAATFSPIIGFVLSMTAWLVTTKIMYGELSVTNTGANGPMLAGNLTSLLSPLLFIPLLTFIPPFKPQKYDWQSMLNIRQSDDRDFADGASMDIETAPTVQIQALGGPDEKAKLDKAAKTARWLTVGVTLVLLILWPMPLYGSGYVFGKSFFTGWVVVGITWLFASMIMVVFLPIFESRSTIVRTSQMMLKDLFGIKGRKKPAIDGQSPNLRTPPEVAEKVEPKA

SEQ ID NO: 148 - protein, 701 aa, Aspergillus_fumigatus
MASSPAQNAEDVVQAPLPQVAGYLIVVVLGLIIALGMSMLLDRERPLTGAVMMGVTKVLKRTAGEDNKRTEMFMTANRTVRTGLTASAVISSWLWSTAMLGSTLVGYSYGVSGPFWFAAGCSPMIVFFALLGISCKRKIPEAHTSLEVVRIRYGRIAHVVFMTLCLINNIFACANMLLGAAAVIAALTGVHIVAATFLLPVGVTVYTFVGGIKATFLTDYFHTAVILTIACYFSVKAVTVGEVSSIGHLYELVKSASERHPVSGNHAATYLTMTSKGGILFGILHICSNFGLVIVSARPNAMLPLTRQMDTSFFIKAFSAAPSAVVPGYTIGGIAYFAIPWALGTIMSSVALGLENNPIFPTYPRRMTSTEVSNGLVLPYAAMAIAGKGGAAAILLITFMAVTSTLSAQVIAVSSILSFDVYREYFNRNASDRQIIRASHFGVIFFAAFSAGFSTMLHYVGIDLGWTLYMLGVVTCPGIFPMAFTILWRQQSKVAAILSPVLGLATGLGVWLGTAKHLYGAVTVSTTGQILPCVYGTVASAFSPIVYSTILTLWRPQNYDWAEFKKVKLALEELGGDLTTVHNQSSKMLAPNAQELKRWGRIAAFWSIATFLGHWVLWPLPMYGAKYIFGKTFFVAWVVVAVIWLWTTMLVAIVYPIVDGGVQQMAQVYQGLTKGEASPSTPVESSTPSHSSILEKEQVKA

SEQ ID NO: 149 - protein, 628 aa, Aspergillus_nidulans
MAETAVQPPLSQAVGYIVVVLIGAIIALVMMLVTKVLKKTTGEDNKKTEMFMTANRTVRTGLTASAVISLLGSSFTGYDYGVSGPFWFAAGCSPMIVFFALVGISCKRKIPEAHTSLEVVRIRYGHIAHAVFMVLCLVNNIFASANMLLGASAVISAIFLTDYFHTTIILIIACYFSVKAFQSDQIGSVGNLYELLKSAGQRHPVSGNQDGTYLTMTSKDMDTSYFIKAFSASPKAVVPGYAIGGAMYFSIPWALGTVMSSVALGLENQPNFPTYPRRMTSSEVSGGLVLPYAAMTIAGKGGAAAVLLMIFMAVTSTLSAQVIAVSSILSFDVYREYFKRSATDRDVIRASHLGVIFFAAFCAGFSTMLHYVGVDLGWTLYMLGVVTCPGIFPMVFTVLWRRQSKAAAILSPILGLATGLAVWLTTAGHFGGEVTVATTGQVLPCVYGTVASAFSPILYSVLITLIRPQDYDWSDFKKEKLSLEKLESDLTTVHHETRDSTAGSIEDGGVNSAAVKAQELKRWGRIAAFWAVATFLGHWVLWPLPMYGSHYVFGKGFYIAWVVVAIIWLWATMFVETLYPIVDGGYQQILQVYRGLRGRQPLPAVAKPGGESADGSISDGAQGEQVKA

SEQ ID NO: 150 - protein, 670 aa, Talaromyces_stipitatus
MSSESLVPLSQGAGYGVVVGIGLVFGIGMVLVNRFLERYLNEKSDHTEMFMVANRSVGTGLTASAVVSSWMWATAIIWTTAQGYLYGIAAPFWYAAGVSIQIALMTVLAIHAKVKVPNGHTVLEIVRLRYGTAAHIIYIFLCFATNLLSVTAMILGAAGVITSLTGMHIVASTFLLPLGVIVYTVAGGLKATFLTDYVHTLIVMVILAFLTIKVINNSAITGLSSFYDVLVEADKTRDIPGNYKGSILSFKSKSSIIFGLVHSFGDFALVLWIRVFGRRPGYMLGGIAYFAVPWAVGTTTGLAAIALERSPIFPTYPRLMTTEEINAGYVLPYTVMAIAGKGGAWALLLVVFMCVTSTTSAELIAVSSIFSFDIYRTYINPKAQDHQVIRVSHWTVIVFGVFASAFATALHYGGIDLNWMGYFLATIICPGMFPLAFTILWKKQSAPAATIAPLLGLASGIAVWLGTAYAYSGELSILSTEAQLPCLWGALTSTFSSAIYSIPDDFDWRVFLLLSEVKDESDEDTSTNSPVKDIKDLNSVTHPYPPQELKRMNRAATLAAIFSAIIGLVTWVVWPLPLYRDYIFGKSFFMGWTAVSEIWLFFCILVAVVYPVVDGRKVLARAFTLFYQSLSGKKDLQSTSPQGETSPSPAEVKEAAVSVQNRSGVLEKSD

SEQ ID NO: 151 - protein, 473 aa, Idiomarina_baltica
MTEFALDTQTALFIIVGFALVWIAFGVWLGRKNKSHEDFALAGRNVGFAFAAATAMATWVTSNTTLVAPQLTYQLGVWGMVGYSFAALGLLLFAPMAKRIKQLLPQGYTSGDFVRLRYGRFAWAVFLVISVVYAFGWLVSLGMAGGILLEALSGLDYYIGMTIILAMCVGYTLFGGLRAVIATDFIQALIIIVGVAVVAYWLIDNVGLTSIHTELSEAHPQLLDLLFPAAVMFLFNNIFFGLGEIFHSNVWWSRALSFRKDVAYKAYLTGGLLWLPIPVVTGFIALAAPQLGIFPASADMIGPAVAASVLGKTGAILVFIVVFSALASSLDSLLAASSDLVTQDIYHKLIKKHASDQQLMRFNRYCLLGIGVMTWLLCLPRIATLGALLNFAGAFVASTIWPIVIGLYWRRLQGTFAGIAMAAGTIAGLIAYFWIGFYVAALVSCAVSGLICAIGIVFNKRQFSWHELQENGQ

SEQ ID NO: 152 - protein, 507 aa, Idiomarina_baltica
METGTLISLALYFIVMLGIGLYAYKKSTDSVSGYMLGGRGLGPAVTALSAGASDMSGWMLMGLPGAIYVAGVSQLWIAVGLVIGAYLNYVIVAPRLRTYTEVADDAITIPDYFANRFNDKGRALRIFSSVVIIIFFTLYTSASLVAGGKLFDSSFGMDYTTGLWVTAGVVCAYTLFGGFLAVSMTDFVQGCIMFVALVLVPIVAFAELGGYSDVVGQVKDINPQFLDFFMDGSTGESLAALGIISLLAWGLGYFGQPHIIVRFMAIRSVSDIKNARRIGISWMFVSIIGAMATGFVGIAYVAETQMTLNDAETIFIIFSQFLFHPLIGGFLLAAILAAIMSTISSQLLVSSSSLTEDFYKAFLRKDASDKELVAVGRISVLLVSLVAIWLAWNPENTILSLVSNAWAGFGAAFGPVVILSLFWRRMNRHGALAGMLLGAITVLIWIYGPTVGGEHLSAYVYEIVPGFIISTIAIIVGSLVTAEPDQNLRDKFDEMEQIMDDHYHTAK

SEQ ID NO: 153 - protein, 568 aa, Idiomarina_baltica
MDIQTLTFIIVGLTFALYIGIAIWSRAGSTNDFYVAGGGVHPIANGMATAADWMSAATYISMAGIIAFAGYDGSVYLMGWTGGYVLLAMCLAPYLRKFGKFTVPDFIGDRYYSQTARTIAVLGAILVSFTYIAGQMRGVGVVFSRFLEVDIATGVIIGMVIVFFYTVLGGMKGITYTQVAQYCVLMFAYIVPAVFLSLLMTGHILPQTGFGGTVADGSGQFLLERLDGLSTQLGFAEYTEGVRSKVDVFFITAALMVGTAGLPHVIVRFFTVPKVRDARRSAFWALAFIAVVYLTAPTIAAFGKMNMINTVNGPDLQGVEYDNAPSWIKNWEKTGLISWEDKNDDGRMFYSGDERNEMTIDRDIMVLANPEIGDLPAWVVALVAAGGVAAALSTSAGLLLVISTSVSHDLLKRNLMPNITDKQELMYARLAAAVAILISGYFGVYPPGFVAQVVAFAFGLAASSFFPAIILGIFNKRMNSTGAIAGMIVGIVFTFSYIVFFKFISPELNTPDHWLFGISPEGIGTLGMIFNFAVAFIVHKMTGDAPKDIQDLVESIRYPKGAGEAQDH

SEQ ID NO: 154 - protein, 478 aa, Idiomarina_loihiensis
MTEFALDTSTGITIIVLFGVFWVAFGYWLGRKNRSHEDFALAGRNVGFAFAAATAMATWVTSNTTLVAPQLTYQFGIWGMVGYSFAALGLVLFAPMAKRIKELLPNGYTSGDFVRLRYGNLAWLVFIIISVVYAFGWLISLGMAGGILLESLSGLDYHIGMTTILVICVGYTLFGGMRAVIATDFIQALIIIVGVSFIAYWIIDNVGLESIHSNLTSEHPQLLDMLFPAAVMFLFNNIFFGLGEIFHSNVWWSRALSFKKNVAYKAYLTGGLLWLPIPIVTGFIALAAPQLGIFPPSPDMIGPTVAAAVLGKAGAIIVFIVIFSALASSLDSLLAATSDLVTQDIFHKKLKPKASDKTLMRFNRSCILGLGVVTWLLCLPRVATLGALLNFAGAFVASTIWPIVLGLYHRRLTGTYAACAMGFGTAFGMLSYFVVGFYVAALVSCAVSGLICLVGIFRSSDKFDWDTLNEKEQSNANQ

SEQ ID NO: 155 - protein, 571 aa, Idiomarina_loihiensis
MDIQTLTFIIVGLTFALYIGIAIWSRAGSTNDFYVASGGVNPIANGMATAADWMSAASFISMAGIVAFAGYDGSVYLMGWTGGYVLLAMCLAPYLRKFGKFTVPDFIGDRYYSQTARTIAVICAILICFTYIAGQMRGVGVVFSRFLEVDIATGVIIGAIIVFFYTVLGGMKGITYTQVAQYIVLMFAYIVPAVFLSLMMTGHVLPQTGFGATIADGVPGSGQFLLERLDGLSTELGFAEYTEGVRSKVDVFFITAALMVGTAGLPHVIVRFFTVPKVRDARRSAFWALTFISVVYLTAPTIASFAKVNIFNTINGPDLQGVEYDNAPSWIKNWEKTGLITWEDNNNDGKMFYSGDERNEMTIDRDIMVLANPEIGELPAWVVALVAAGGVAAALSTSAGLLLVISTSVSHDLLKRNLAPNITDKQELLYARVAAATAIVISVYFGIYPPGFVAQVVAFAFGLAAASFFPAIIMGVFHKRMNSTGAIAGMVVGILFTFSYIVYFKFVAPELNTQENWLFGISPEGIGTLGMIINFVVAVVVHKFTGDAPEEIQELVESIRYPKGSGEAKPH

SEQ ID NO: 156 - protein, 510 aa, Idiomarina_loihiensis
METGTLISLALYFIVMLGIGLYAYKKSTDSVSGYMLGGRGLGPAVTALSAGASDMSGWMLMGLPGAIYVSGVSQLWIAVGLVIGAFLNYVIVAPRLRTYTEVANDSITIPGYFSNRFNDKGRRLRIFSSVVIIIFFTLYTSASLVAGGKLFDSSFGMDYTTGLWVTAGVVCAYTLFGGFLAVSMTDFVQGCIMFVALVLVPIVAFVDLGGYSSVVGQVNDIDTNFLDFFYNVDKGEAIGFLGIVSLLAWGLGYFGQPHIIVRFMAIRSVSDVKAARRIGVSWMVVSIIGAMATGFVGIAYVATQPMGIADAETIFIEFSQVLFHPLIGGFLLAAILAAIMSTISSQLLVSSSSLTEDFYKAFLRKDASERELVMVGRLSVLVVTLVAIYLAYGETETVLALVSKAWAGFGAAFGPVVILSLFWKRMNRNGALAGMLTGAITVLLWIFSPILFGIDLSDEVVYEMVPGFILSTLAIIIFSKLTDEPAQELQDKFVEMESVIDGYYHGDKKG

SEQ ID NO: 157 - protein, 500 aa, Mycobacterium_gilvum
MFHPSNLSPGIGIALMLGLGALMFVVAFAVRTMVRNTHDFVIADRRIGFGFGVGSVIAVWTWSMAVMMSSAQAFSFGTSGLLWFVVPNGLAVMVMVPFALRLRRQMPAGYTIVEFIRQRFQNKPATTVMLVAMLLGLLAEIFINLFGVVLVMGVVFGLDPTAVLILTLLTVTVYSYFGGLWTSAITATFNTLLITVPAAIVVLFVLQKVGGPELVFQKVDEAGANTLDAFDGSAAAAFGISLALGLLASTMADQTFWQKAWALKPASMGRTFVWAGLWFYPIPIVLGLLGLVGLGFGVTPEDLGDAGAGGIGPYVISHLGLPVILIALYVLIILNACYSSIDGAFSALSSVVAVDILKQAKPDIAPKSLFRYTKTSILVAGVIGGIVVSSGIDYVELVTTVFFLKAALIIPLGLAIFWKRMTSTAFVASLVLAIAVGYPVRQYVGELAGIITLEGISLVAAVGISLLSRQTFDYGSLRRGDALAGDVITEAPVAEPDPVR

SEQ ID NO: 158 - protein, 541 aa, Mycobacterium sp.
MTVLAAETIGNPVANMSIFAVFVLVTLFIVIKASKKNATATEFFTAGRAFTGPQNGIAISGDYLSAASFLGIAGAIAVYGYDGFLYSIGFLVAWLVALLLVAELLRNTGKFTMADVLSFRLKQRPVRLAAATNTLAVSLFYLLAQMAGAGVLVALLLNIESDLGQSIVIAVVGVLMIVYVLVGGMKGTTWVQIIKAVLLIGGAGIMTIMVLAKFNFNFSEILGSAQAMVSSSTDAKVASRDVLAPGAQYGASLTTQINFISLALALVLGTAGLPHVLMRFYTVPTAKEARRSVVWAIALIGAFYLFTLALGYGAAALVGPDRILAAPGGVNSAAPQLAFELGGVVLLGVISAVAFATILAVVAGLTITASASFAHDIYASVMKSHQVTESEQVKISRITAVVLGTLAIGLGILAREQNVAFLVALAFAVAAAANLPTILYSLYWRRFNTRGALWSMYGGLISTIVLIVFSPAVSGTATSMIKGADFAWFPLANPGIVSIPLAFILGIVGTLTSPDDEDPTIAAEMEVRSLTGVGAEKAVSH

SEQ ID NO: 159 - protein, 541 aa, Mycobacterium sp.
MTVLAAETIGNPVANMSIFALFVLVTLFIVIKASKKNATATEFFTAGRAFTGPQNGIAISGDYLSAASFLGIAGAIAVYGYDGFLYSIGFLVAWLVALLLVAELLRNTGKFTMADVLSFRLKQRPVRLAAATNTLAVSLFYLLAQMAGAGVLVALLLNIESDLGQSIVIAVVGVLMIVYVLVGGMKGTTWVQIIKAVLLIGGAGIMTIMVLAKFNFNFSEILGSAQAMVSSSEDAKVASRDVLAPGAQYGASLTTQINFISLALALVLGTAGLPHVLMRFYTVPTAKEARRSVVWAIALIGAFYLFTLALGYGAAALVGPDRILAAPGGVNSAAPQLAFELGGVVLLGVISAVAFATILAVVAGLTITASASFAHDIYASVMKSHQVTESEQVKISRITAVVLGTLAIGLGILAREQNVAFLVALAFAVAAAANLPTILYSLYWRRFNTRGALWSMYGGLISTIVLIVFSPAVSGTATSMIKGADFAWFPLANPGIVSIPLAFILGIVGTLTSPDDEDPTIAAEMEVRSLTGVGAEKAVSH

SEQ ID NO: 160 - protein, 576 aa, Mycobacterium_smegmatis
MWMTTTTTLAADLAAENVLRLSVGAIDYLLIAIYFVFVLGIGYVARSQISTSLDFFLSGRRMPAWVTGLAFVSANLGAIEIMGMSANGAEIGLSTMHYYWIGAVPAMVFLGIVMMPFYYGSKVRSVPEFMRRRFGPGAHLVNAISFAVAQVLIAGVNLFLLATVINVLLGWNQWLSLIVAALIVLTYTALGGLSAAIYNEVLQFFVILAFLVPLTIFGLIKVGGWSGLKDKVIDTMSDGAVTASVDEQLTTWPGQALSGFSSPVWSVIGIVFGLGFVLSFGYWTTNFVEVQRAMASDSISSARRSPIIAAFPKMFIPFVVVIPGMIAGAVIGDVVHLKSTGSGEVTYNDAMLVMIRDILPNGLIGVAITGLLASFMAGMAANISAFNTVFSYDIWQQYVVKDRPDNYYIGVGRIATVAATILAIFTALIAAGYSNLMDYLQTLFGFFNAPLFATFILGMFWRRMTSTAGWTGLVAGTLSAVTVFLLGESGVINLPGQGVPFVAAAAAFVVDIAVSVVVSLVTTPKPAHELAGLVYSETPREIFHDPESAGKPWYLRATPLAAVALGLAVVLNIVFH

SEQ ID NO: 161 - protein, 508 aa, Mycobacterium_smegmatis
MSDLTFQMIAIGLYFAMMLAIGYYAFRRTSDLDDYMLGGRKLLPGVAALSAGASDMSGWLLLGVPGAIYASGLFESWIVIGLVVGAWLNWKFVAPRLRAYTEIANNSITVPSFFENRLRDHSHVLRIAAGAIILVFFTFYVSSGMVAGGVFFETSFGSSYLVGMLVVAGVTLCYTLFGGFLGASLTDVAQALLMFAALVTIPVVTIIVTGGPGAVIDLVHSADAAQSIAGDEMHRTSLFFGGGFLAIVSAAAWGLGYFGQPHIIVRFMAMRSAADAKAGRRIGISWMILTAIGAITTGFAGLAYFFREGVTLDNPETVFLRLAQVLFHPFVAGVVLAAVLAAIMSTISSQLIVCSSALVEDIYRAFGKEASPTRLVTYGRLGVLTVAVVAILLALNPDGTILDLVGFAWAGFGAAFGPLILLSLFWRRLTSAGAIAGMIAGAVVVGIWGQTEALSSAMYEIVPGFIACLMVAVAVSLFTAREDDEIQREFTEMAEKASAPMGEPAASA

SEQ ID NO: 162 - protein, 507 aa, Mycobacterium_vanbaalenii
MILLGVAISIAVVVAVGFFVSRRIEGDSSNFLVGGRMLPFWLVGGALMGAAVDTNATLGNTDLAFGFGFWAGATLPLGLALCLTITGIFFAKPMNRMGLTSFPDYYRLRFGRSVEVGASLLLVVAFCMLVAGNLVAGGLLFNYFLGMPYWLGVVLIAAIAVAYTGTGGLIADAYTAIIQMALILAGAIGLFVWMSSTHGIDIAEGTGPFAFGQLSDPAQGAVINWATLIALGIGDVVAIDFMARVFSAKSPDAARKACFSAATGTVAICVPFGLVVLAAHSFMPAELDGPVLFVLLDQYAPAGLTVLVLCGLVGASMSTANGAILAISNVCVRNLGGVRRVHEPGKRDPLLRATRIAMVPMTLFSIAFAIYVKQTGILLTLAFDLLLACLAVPFILGLYWRRGTVKAAMAAMVVGFVVRVGLFVLTPTIYGVDNTILYIPNTLVGAAFDGWPTFIAFAAAILTYVSVSLATRPAHMRGLDIRVAQDIDDALDDPDAFEKEPELAKAT

SEQ ID NO: 163 - protein, 505 aa, Mycobacterium_gilvum
MILLGVAISIAVVVAVGFFVSTRIKGDSSNFLVGGRMLPFWLVGGALMGAAVDTNATLGNTDLAYEFGFWAGACLPLGLALCLLITGIFFAKPMNRMGLTSFPDYYRLRFGRSVEIGASILLAVAFCMLVAGNLVAGGLLFNYFLGMPHWLGVVLIAAIAVAYTGTGGLIADAYTAIIQMGLILAGAIGLFFWMTTTHGLDIADGTGPFALGQLSDPAQGAVINWATLIALGIGDIVAIDFMARVFSAKSPEAARRACFTAAAGTAAICVPFGLVVLAAHSFLPAELDGPVLFVLLDQYAPAGLTVLVLCGLMGASMSTANGAILAISNVCVRNLGGVRRVHEPGRKDPLLRAARVAMAPMTLFSILFAIYVQQTGILLTLAFDLMLACLIVPFILGLVWRRGTTTAALAAIAVGFTVRIGLFVLTPTMFGVENTILYIPNDLVSASFDGWPTFIAFAAGLATYVAVALATKPAHMRGLDIQVARDLDDILDDADRFEKEPEPVS

SEQ ID NO: 164 - protein, 505 aa, Mycobacterium sp.
MILLGVAISIAVVVAVGFFVSTRIKGDSSNFLVGGRMLPFWLVGGALMGAAVDTNATLGNTDLAYEFGFWAGACLPLGLALCLLITGIFFAKPMNRMGLTSFPDYYRLRFGRSVEIGASILLAVAFCMLVAGNLVAGGLLFNYFLGMPYWLGVVLIAAIAVAYTGTGGLIADAYTAIIQMGLILAGAIGLFFWMTTTHGLDIADGTGPFALGQLSDPAQGAVINWATLIALGIGDIVAIDFMARVFSAKSPEAARRACFTAAAGTAAICVPFGLVVLAAHSFLPAELDGPVLFVLLDQYAPAGLTVLVLCGLMGASMSTANGAILAISNVCVRNLGGVRRVHEPGRKDPLLRAARVAMAPMTLFSILFAIYVQQTGILLTLAFDLMLACLIVPFILGLVWRRGTTTAALAAIAVGFTVRIGLFVLTPTMFGVENTILYIPNDLVSASFDGWPTFIAFAAGLATYVAVALATKPAHMRGLDIQVARDLDDILDDADRFEKEPEPVS

SEQ ID NO: 165 - protein, 474 aa, Novosphingobium sp.
MTSEAALLPAGVGWALLAAFSVLWIGLGIYWGRRNKSFEDHALAGRNIGLALGSATAAATWITSNTTMLAPQFALQLGVWGMLAYSTAAIGLLLFAPMAGRIRKLMPNGYTSGDFFRLRYGRVAWAVFLLFTLFYSLTWLVSMAMAGGILLNTLSGIPYAWGMSVILGVCVLYTMRGGLAAVIGTDFIQSLIIIVGIVIVGVAVLSHVPVEKIHSNLATERPALLDVLFPAAIMAIFNNLLFGLGEVFHNNVWWSRAFAFREGVAGKAFALGGLIWFPIPFAAGFVALASGALNVPVPAADMVGPLVVAEVLGEAGAIGIFIIVFCSLASSIDSLLAATADLMTEDVYRRMFRPAAHPETLKKMAQWVTLGLGLFTWAVCLPRIGTLATVLFFAGPLVGSMIWPIVTGLYWRRANTTGAVGGMLLGAGVGLFFYFAIGFYVASLIATAVSMIWVLACSALSKTRFDWALLREAE

SEQ ID NO: 166 - protein, 482 aa, Rhodopirellula_baltica
MSGELLAVTGAILSPQSGYILLAIFGILWIALGWWWGRQAKSYDGFAVAGRNVGLAMGTATAVATWITSNTTMLAPQYALQLGIWGALAYSTASFGLFAFAPMSGRIRQLMPKGYTAVEFIRRRYGWLGTVPFLIISLFYAVTWLVSMSMAGGKLLNVLSGIPYEYGMTVVVLVCVAYTLFGGMYAVIGTDFIQSLIILVGLVVVAIAVLTQVEIQEVHEKLQNERPMLLSAFFPAALMALFNNMLFGFGEIFHSNVWWSRAFAMREGVGPKAYALGGVLWLPVPIVAGFLGLAAPALGIGISEPDTAGPLVAATLLGTGGALLVFVVVFCSLASSIDSLLAATSDLIVNDIAEPIQKRVTNRHSSDSSKRKLSAMAIVGLGAIAWIAAFPNVGSLATVLFFAGPMVGSCIWPILCGLYFRRASPIAACASMVLGSLLGLVAYFQIGWFTASLIGAAVSGVTFAVCCQIWPDDFEFATLADD

SEQ ID NO: 167 - protein, 482 aa, Rhodopirellula_baltica
MSGELLAVSGAILSPQSGYILLAIFGILWIALGWWWGRQAKSYDGFAVAGRNVGLAMGTATAVATWITSNTTMLAPQYALQLGIWGALAYSTASFGLFAFAPMSGRIRQLMPKGYTAVEFIRRRYGWLGTVPFLIISLFYAVTWLVSMSMAGGKLLNVLSGIPYEYGLTVVVLVCVAYTLFGGMYAVIGTDFIQSLIILVGLVVVAIAVLTQVEIQEVHEKLQNERPMLLSAFFPAALMALFNNMLFGFGEIFHSNVWWSRAFAMREGVGPKAYALGGVLWLPVPIVAGFLGLAAPALGIGISEPDTAGPLVAATLLGTGGALLVFVVVFCSLASSIDSLLAATSDLIVNDIAEPIQKRVTNRHASDSSKRKLSAMAIVGLGAIAWIAAFPNVGSLATVLFFAGPMVGSCIWPILCGLYFRRASPIAACASMVLGSVLGLVAYFQIGWFTASLIGAAVSGVTFAVCCQIWPDDFEFATLADD

SEQ ID NO: 168 - protein, 507 aa, Rhodopirellula_baltica
MAISFFDLAVLVIYMLAMVAFGIWVGRDQKDLAGYLLGGRSMPWWSILGSIVATETSTATFLSVPGIAFAVDGDMRFLQLGMGLVIGRLIVAIVLVPLFRRGEIYSAYEILATRFGGSSKRFASLLFLVTRNLGDGLRLFLAGIALEKVLSVDLVSCIVILGVFTIVYTFFGGIKAVIWSDCIQLVVYMVGGVLSLQILVNYFPGGWQQLVEFGQETGRFHVFDFRVRATETFSVLTEPFTFWSGVIGGAVLTLGTHGTDQMIVQRYLAARSTVDAQRAVVASGVVVLIQFALFLVLGVALACFYSQIHPRAFEHNDEVFAAFIVDYLPVGLVGITLAAVFAAAMSTLSSSLNSSASAAVSDFYQPWLLARYNRSSDKETDEKSFDRETSGNLLGVSRKLTIAFGLIQIGIGIGASYLSSSVISDALAIAGFTAGILLGVFLLGILTTSAHQRGALIGMVSGMVVLTAIKFGTAVAWPWFAIIGSVTTFTAGYIASRLIPAGRRAEN

SEQ ID NO: 169 - protein, 602 aa, Rhodopirellula_baltica
MALSYVDYAIIIAFFVITTSIGLFASRRAGKSFAEYFLAGGQMSWWMLGISMVATTFAADTPNLVTGIVRRDGVSGNWVWWAFLLTGLLTVFVYARLWKRSGVSTDLEFYELRYSGKTAGFLRGFRAIYLGVIFNCLVMANVILAGIKLGGVLVGATPIQVVLVTGTITVIYTLLGGLRGVILTDCFQFIVAMFGAIAAAYVVCNLPEVGGFSNLLQHEEVRSKTALLPDFSDMDALIPLMIIPFAVQWWSGWYPGSEPGGGGYVAQRMLGARSEKDATLATLLFQATHYALRPWPWIIVALASIVVFPNLESIQVAFPDIDPQIVQDDLAYPAMLTFLPSGLLGIVIASLIAAFMSTISTHLNWGASYIAHDFYRRFVNPDATEQRLVATGRWATVGLMIVAGAVALTLESAMESFGIILQIGAGTGLIYILRWFWWRINAFTEITGMAVSLAIAMFFKFGYSHTGLPELNSWQQLLTGVVITTVSWMLVTFLSPPTDRETLKRFVTKIRPGGAGWKSIRDELADSGIHVATGDSITAGLKAMMASTFLVYSALFSTGYLLYQSWLCLAVSLSVCVASAIALWKTWPSLQIDGPARASDQS

SEQ ID NO: 170 - protein, 484 aa, Rhodopirellula_baltica
MGLIAAVLAYLLLTIAIGLLAARRVGNAQDFMVAGRSLPLYMNFACVFATWFGAETVLSVSATFAGQGLRAIPGDPFGFSICLVLVALFFARAFYRMDLLTIGDFYRKRYGRSIEVLTSVVISASYLGWAAAQLTALGLVISVLGKGIGYETLTINNGIVIGFTIVAFYTVMGGMWSVALTDMIQTFVIIIGLLVVSVYMAHAAGGVSVVIESARESGRLQIFPDWGQSGQWWIYIGGFLTAALGSIPQQDVFQRVTSAKDERTAMTGTLLGGMFYCMFAFVPMFIAYAAVVIDPDHLQQFNSDDLREVQRTLPHAVMQSTPFWVQTVFLGALVSAILSTASGTLLAPSSLIVENVIRPFRSDLDDKNMLRWLRIVLLMFGALALHQALTSNNTMYEMIQQAYSVPLVGALVPLAVGLYWKRATTRGAMASIVSGVATWLAFEYMLPEFLIPSQLMGLAASFLAMVVVSLLDKSESIRPDAVQR

SEQ ID NO: 171 - protein, 484 aa, Rhodopirellula_baltica
MGLIAAVLAYLLLTIAIGLLAARRVGNAQDFMVAGRSLPLYMNFACVFATWFGAETVLSVSATFAGQGLRAIPGDPFGFSICLVLVALFFARAFYRMDLLTIGDFYRKRYGRSIEVLTSVVISASYLGWAAAQLTALGLVISVLGKGIGYETLTINNGIVIGFTIVAFYTVMGGMWSVALTDMIQTFVIIIGLLVVSVYMAHAAGGVSVVIESARESGRLQVFPDWGQSGQWWIYIGGFLTAALGSIPQQDVFQRVTSAKDERTAMTGTLLGGMFYCMFAFVPMFIAYAAVVIDPDHLQQFNSDDLREVQRTLPHAVIQSTPFWVQTVFLGALVSAILSTASGTLLAPSSLIVENVIRPFRSDLDDKNMLRWLRIVLLMFGALALHQALTSNNTMYEMIQQAYSVPLVGALVPLAVGLYWKRATTRGAMASIVSGVATWLAFEYMLPEFLIPSQLMGLAASFLAMVVVSLLDKFENIRPDAVQR

SEQ ID NO: 172 - protein, 542 aa, Rhodopirellula_baltica
MIAAMAFTGLDYAVLVGYFIAIMAMGFYFWARNRSADDFTAGGRSLPGWLCGLSIFATYLSSISYLALPGKAFVDNWNAFMYSLAIPVAAAIAVRWFLPLYRSSGEVSAYSLLERRFGLWARLFASGFYLLYQIARIGVVMYLMALPMAVLFGWDIRVVILCTGVVVTVYSFVGGIVAVIWADAIQAIVLLAGALLALAILLMGMPGGPAEVLAVANENEKFSLGDSSFLILSKPTIWVVLAFGLFDNLRNFGVDQSYVQRYIASSSDKEAAKSVWVGALLYVPVSALFLFIGSSLYAYYEGHPQDLAEVRTIVAEQKLMQDGVSKEDADYSTLLLETSSKLKDEDLGDRVFPHFIAANLPQGVRGLLIAAVFAAAMSTVSTSLNSSATLVMSDFYKRLFRQDSTDAQHVGVLRMSTVAWGAMGTAMALALVRLTDSTLDVWWTLSGVLGAGIVGLFLLGVTVPRLHGGPAITAFAIGGVAIAWMTISQTNAWPEGWERYANPMDKLMTIVVGPCLMIAIGSIFAATGLVGDQTSRKDWSES

SEQ ID NO: 173 - protein, 542 aa, Rhodopirellula_baltica
MIAAMAFTGLDYAVLVGYFIAIMAIGFYFWARNRSADDFTAGGRSLPGWLCGLSIFATYLSSISYLALPGKAFVDNWNAFMYSLAIPVAAAIAVRWFLPLYRSSGEVSAYSLLERRFGLWARLFASGFYLLYQIARIGVVMYLMALPMAVLFGWDIRVVILCTGVVVTVYSFVGGIVAVIWADAIQAIVLLAGALLALAILLMGMPGGPAEVLAVANENEKFSLGDSSFLILSKPTIWVVLAFGLFDNLRNFGVDQSYVQRYIASSSDKEAAKSVWVGALLYVPVSALFLFIGSSLYAYYEGHPQDLAEVRTIVAEQKLMQDGVSKEDADYSTLLLETSSKLKDEDLGDRVFPHFIAANLPQGVRGLLIAAVFAAAMSTVSTSLNSSATLVMSDFYKRLFRQDSTDAQHVGVLRMSTVAWGAMGTAMALALVRLTDSTLDVWWTLSGVLGAGIVGLFLLGVTVPRLHGGPAITAFAIGGVAIAWMTISQTNAWPEGWERCANPMDKLMTIVVGPCLMIAIGSIFAATGLVGDQTSRKDWSES

SEQ ID NO: 174 - protein, 602 aa, Rhodopirellula_baltica
MALSYVDYAIIIAFFVITTSIGLFASRRAGKSFAEYFLAGGQMSWWMLGISMVATTFAADTPNLVTGIVRRDGVSGNWVWWAFLLTGLLTVFVYARLWKRSGVSTDLEFYELRYSGKTAGFLRGFRAIYLGVIFNSLVMANVILAGIKLGGVLVGATPIQVVLVTGTITVIYTLLGGLRGVILTDCFQFIVAMFGAIAAAYVVCNLPEVGGFSNLLQHEEVRSKTALLPDFSDMDALIPLMIIPFAVQWWSGWYPGSEPGGGGYVAQRMLGARSEKDATLATLLFQAAHYALRPWPWIIVALASIVVFPNLESIQVAFPDIDPQIVQDDLAYPAMLTFLPSGLLGIVIASLIAAFMSTISTHLNWGASYIAHDFYRRFVNPDATEQRLVAIGRWATVGLMIVAGAVALTLESAMESFGIILQIGAGTGLIYILRWFWWRINAFTEITGMAVSLAIAMFFKFGYPHTGLPELNSWQQLLTGVVITTVSWMLVTFLSPPTDRETLKRFVTKIRPGGAGWKSIRDELADSGIHVATGDSITAGLKAMMASTFLVYSALFSTGYLLYQSWLCLAVSLSVCVASAIALWKTWPSLQIDGPARASDQS

SEQ ID NO: 175 - protein, 507 aa, Rhodopirellula_baltica
MAISFFDLAVLVIYMLAMVAFGIWVGRDQKDLAGYLLGGRSMPWWSILGSIVATETSTATFLSVPGIAFAIDGDMRFLQLGMGLVIGRLTVAIVLVPLFRRGEIYSAYEILATRFGGSSKRFASLLFLVTRNLGDGLRLFLAGIALEKVLSVDLVSCIVILGVFTIVYTFFGGIKAVIWSDCIQLVVYMVGGVLSLQILVNYFPDGWQQLVEFGQETGRFHVFDFRVRTTETFSVLTEPFTFWSGVIGGAVLTLGTHGTDQMIVQRYLAARSTVDAQRAVVASGVVVLIQFALFLVLGVALACFYSQIHPRAFEHNDEVFAAFIVDYLPVGLVGITLAAVFAAAMSTLSSSLNSSASAAVSDFYQPWLLARHNRASDEETDEQSFDRETSGNLLGVSRKLTIAFGLIQIGIGIGASYLSSSVISDALAIAGFTAGILLGVFLLGILTTSAHQRGALIGMVSGMVVLTAIKFGTAVAWPWFAIIGSVTTFTAGYIASRLIPAGQRAEN

SEQ ID NO: 176 - protein, 476 aa, Synechococcus sp.
MSASAAPFLHPGVAWALVVLFSVLWVALGVAWGRRGKGDADEYMLAGRNIGLALSTATLMASWVTGNTTLLAPEFGYKTGLWGMFSYALAGLGLILFAPLASRIKQLMPNGRTSGDFIRLRYGRLAWWVFMLITAVYTLGFLMTQAMGAGLLLQALSGFNYHVGMVVVIGVATVYTLFGGMRAVIGTDFIQSLLIMVLLAVVAVLAFRQFPMPEVHASLLARHPDRLDLLLPAGLLIAWNSALFSMGEVFHNNIWWSRVFASRRSVVMTSFVLGGIAWMSVPMVTGSIGLVALARELPLDQVNMVFPVMAADLLGAGGAALVFVVVFASLTSTLDSLLASTADLLAEDVYFRLLRPQASDLQLKQAARLMVVGLAVVTLVLSWPRLDSLASVLFFTGALVASTVWPVACGLYWRTANRKAAIAAMLAGSVVGLLAYVLIAPYCAAVFSAAVSAVVMLIGSRIWPERFDFTLLQEEG

SEQ ID NO: 177 - protein, 474 aa, Synechococcus sp.
MKVEPFLAPGLAWALVVLFSVLWIALGVAWGRKGKSDADEYMLAGRNIGLALSTATLMASWVTGNTTLLAPEFGYKTGLWGMFSYALAGLGLILFAPLALRIKQLMPNGRTSGDFIRLRYGRLAWWVFMVITAIYTLGFLMTQAMGAGILLQSLSGFDYHVGMIVVIGVAMLYTLYGGMRAVIGTDFIQSVLIMVLLAVVAVLAFRQFPAPAVHARLINSHADHLNLLLPAGLLIAWNSALFSMGEVFHNNIWWSRVFASRRSVVMTSFVLGGLAWMSVPIVTGSIGLVALARGLEFPQVNMVFPVMAADLLGVGGAALVFVVVFASLTSTLDSLLASTADLVAEDIYFRLLRPQASDAQLKQAARVTVVGLAVLTLLLSWPRLDSLASVLFFTGALVASTVWPVACGLYWPHANRNAAIVAMVSGSVVGLSAYVWIAPYCAAVFSTAVSALVMVVGSVRWPERFQWSLLKEAL

SEQ ID NO: 178 - protein, 473 aa, Synechococcus sp.
MAEPFLAPGIAWMLVVLFSVLWIALGIWWGHQGKGDADEFMLAGRNIGLALSTATLMASWVTGNTTLLAPEFGYRNGLWGMFSYALAGLGLILFAPLALRIKDLMPSARTSGDFIRLRYGRAAWWVFMVITAIYTLGFLITQAMGAGILLEALSGFDYRLGMVVVIGVSTIYTLFGGMRAVVGTDFIQSLLIMVLLLVVAALAYMRFPSSEVHQALIASHPQRLNLLLPAGLLIAWNSALFSMGEVFHSNIWWSRVFASRRNVVFRSFVLGGLGWMTIPIVTGSIGLLALASKLEVPQVNMVFPVMTAQLLGAGGAALVFIVVFASLTSTLDSLLASTADLLAEDVFLKLFKPEASDRELKLATQWMVVLLGGLTLLLSWPRLDSLASVLFFTGALVASTVWPVACGLYWPTASRSGAIAAMLAGTACGLAAYWLIAPYCAAVLSAAVSAVVMIVASRFWPAEFRWSQLQEEA

SEQ ID NO: 179 - protein, 476 aa, Synechococcus sp.
MTLLAATPLLSPGIAWALVVIFAVLWIALGVSWGRRGQGDADDYMLAGRNIGLALSTATLMASWVTGNTTLLAPEFGYRNGLWGMFSYALAGLGLILFAPLAIRIKQLMPRGRTSGDFIRLRYGRAAWWVFMVITAIYTLGFLITQAMGAGILLEALSGFDYRLGMVVVIGVSTIYTLYGGMRAVVGTDFIQSLLIMGLLVVVAVLAFQRFPLEQVHSNLAASHPDRLNLLLPAGLLIAWNSALFSMGEVFHNNIWWSRVFSSRTSVVFNSFILGGLAWMTVPVVTGSIGLVALADNLELPQVNMVFPVMASQLLGAGGSALVFVVVFASLTSTLDSLLASTADLVAEDVIFKLLNPQLSDAQLRQATKLVVVLLGLITLALSWPRLDSLASVLFFTGALVASTIWPVAYGLYWPQANRQAAIAAMVAGSAAGLTAYVQIAPYCAALISAAVSAVVMAVGTSLRPEQFQWHILRGE

SEQ ID NO: 180 - protein, 476 aa, Synechococcus sp.
MPADAAPFLAPGIAWALVVLFSVLWIALGIVWGRRGKGDADDYMLAGRNIGLALSTATLMASWVTGNTTLLAPEFGYRTGLWGMFSYALAGLGLILFAPLAVRIKQLMPHGRTSGDFIRLRYGRLAWWVFMVITAVYTLGFLMTQAMGAGLLLQALSGFDYHVGMVVVIGVSTVYTLFGGMRAVIGTDFIQSLLIMVLLAVVAVLAFRQFPMPEVHARLISTHPDRLDLLLPAGLLIAWNSALFSMGEVFHNNIWWSRVFASRRSVVMTSFVLGGLAWMSIPLVTGSIGLVALARDLPLEQVNMVFPVMAADLLGAGGAALVFVVVFASLTSTLDSLLASTADLLAEDVYFRLLRPQASDAQLKQAARQMVVGLSVLTLALSWPRLDSLASVLFFTGALVASTVWPVACGLYWSSANRWAAIVAMAAGSAVGLSAYVLIAPYCAAVFSAAVSAVVMVVGSRWQPEGFDFNRLQEGV

SEQ ID NO: 181 - protein, 476 aa, Synechococcus sp.
MSADAAPFLAPGIAWALVVLFSVLWIALGIAWGRRGKGDADDFMLAGRNIGLALSTATLMASWVTGNTTLLAPEFGYRTGLWGMFSYALAGLGLILFAPLAARIKQLMPNGRTSGDFIRLRYGRLAWWVFMVITAVYTLGFLMTQAMGAGLLLQALSGFDYHVGMVVVIGVATVYTLFGGMRAVIGTDFIQSLLIMVLLAVVAVLAFRQFPMPEVHARLIAEHPDRLDLLLPAGLLIAWNSALFSMGEVFHNNIWWSRVFASRRSVVMTSFLLGGLAWMSVPLVTGSIGLVALARDLQLEQVNMVFPVMAADLLGAGGAALVFVVVFASLTSTLDSLLASTADLLAEDVYFRLLRPQANDAQLKQAARLMVVGLAVVTVALSWPRLDSLASVLFFTGALVASTVWPVACGLYWSSANRWAAIVAMVAGSAVGLTAYVLIAPYCAAVFSAAVSAVVMVVGSRRKPERFDFNLLKEEG

SEQ ID NO: 182 - protein, 476 aa, Synechococcus sp.
MSADSVPFLQPGIAWALVVLFSVLWVALGIAWGRRGQGNADDYMLAGRNIGLALSTATLMASWVTGNTTLLAPEFGYKTGLWGMFSYALAGLGLILFAPLASRIKQLMPNGRTSGDFIRLRYGRLAWWVFMVITAIYTLGFLMTQAMGAGLLLQALSGFDYHVGMVVVIGVATVYTLFGGMRAVIGTDFIQSLLIMVLLAVVAVLAFRQFPMPEVHASLVARHPDRLDLLLPAGLLIAWNSALFSMGEVFHNNIWWSRVFASRRSVVMTSFVLGGIAWMSVPMVTGSIGLVALARELPLEQVNMVFPVMAADLLGAGGAALVFVVVFASLTSTLDSLLASTADLLAEDVYFRLLRPQASDLQLKQAARLMVVGLAVVTLALSWPRLDSLASVLFFTGALVASTVWPVACGLYWRTANRTAAIAAMLAGSVVGLLAYVLIAPYCAAVFSAAVSAIVMLMGSRFWPERFDFTLLQEEG

SEQ ID NO: 183 - protein, 476 aa, Synechococcus sp.
MSADSVPFLQPGIAWALVVLFSVLWVSLGIAWGRRGQGNADDYMLAGRNIGLALSTATLMASWVTGNTTLLAPEFGYKTGLWGMFSYALAGLGLILFAPLASRIKQLMPNGRTSGDFIRLRYGRLAWWVFMLITAIYTLGFLMTQAMGAGLLLQALSGFDYHVGMMVVIGVATFYTLFGGMRAVIGTDFIQSLLIMVLLAVVAVLAFRQFPMPEVHASLLARHPDRLDLLLPAGLLIAWNSALFSMGEVFHNNIWWSRVFASRRSVVMASFVLGGIAWMSVPMVTGSIGLVALARELPLEQVNMVFPVMAADLLGAGGAALVFVVVFASLTSTLDSLLASTADLLAEDVYFRLLRPQASDLQLKQAARLMVVGLAVVTLALSWPRLDSLASVLFFTGALVASTVWPVACGLYWRTANRTAAIAAMLAGSVVGLLAYVLIAPYCAAVFSAAVSAVVMLMGSRIWPERFDFTLLQEEG

SEQ ID NO: 184 - protein, 476 aa, Synechococcus sp.
MSADSAPFLAPGIAWALVVLFSVLWVALGIAWGRRGQSDADDYMLAGRNIGLALSTATLMASWVTGNTTLLAPEFGYKTGLWGMFSYALAGLGLILFAPLASRIKQLMPNGRTSGDFIRLRYGRLAWWVFMVITAIYTLGFLMTQAMGAGLLLQALSGFDYHVGMVVVIGVATLYTLFGGMRAVIGTDFIQSLLIMVLLAVVAVLAFRQFPMPEVHASLLARHPDRLDLLLPAGLLIAWNSALFSMGEVFHNNIWWSRVFASRRSVVMTSFVLGGIAWMSVPMVTGSIGLVALAREIPLEQVNMVFPVMAADLLGAGGAALVFVVVFASLTSTLDSLLASTADLLAEDVYFRLLRPQASDLQLKQAARLMVVGLAVVTLALSWPRLDSLASVLFFTGALVASTVWPVACGLYWRTANRTAAIAAMLAGSVVGLLAYVLIAPYCAAVFSAAVSALVMLIGSRLRPERFDFTLLQEET

SEQ ID NO: 185 - protein, 476 aa, Synechococcus sp.
MSADSAPFLAPGIAWALVVLFSVLWVALGIAWGRRGQSDADDYMLAGRNIGLALSTATLMASWVTGNTTLLAPEFGYKTGLWGMFSYALAGLGLILFAPLASRIKQLMPNGRTSGDFIRLRYGRLAWWVFMVITAIYTLGFLMTQAMGAGLLLQALSGFDYHVGMVVVIGVATLYTLFGGMRAVIGTDFIQSLLIMVLLAVVAVLAFRQFPMPEVHASLLARHPDRLDLLLPAGLLIAWNSALFSMGEVFHNNIWWSRVFASRRSVVMTSFVLGGIAWMSVPIVTGSIGLVALAREIPLEQVNMVFPVMAADLLGAGGAALVFVVVFASLTSTLDSLLASTADLLAEDVYFRLLRPQASDLQLKQAARLMVVGLAVVTLALSWPRLDSLASVLFFTGALVASTVWPVACGLYWRTANRTAAIAAMLAGSVVGLLAYVLIAPYCAAVFSAAVSALVMLIGSRLRPERFDFTLLQEET

SEQ ID NO: 186 - protein, 472 aa, Synechococcus sp.
MAQPFLAPGIAWALVVIFSVLWIALGVSWGRKGKGDADDYMLAGRNIGLALSTATLMASWVTGNTTLLAPEFGYRNGLWGMVSYALAGLGLILFAPLALRIKQLMPAGRTSGDFFRLRYGRAAWWVFMVITAVYTLGFLMTQAMGAGILLEALSGFDYRLGMVVVIGVSTIYTLYGGMRAVVGTDFIQSLLIMVLLVVVAVLAFRQFPVPEVHRELVASHPGRLNLLLPAGLLIAWNSALFSMGEVFHNNIWWSRVFASRPSVVFRSFVFGGLAWMTVPVVTGSIGLVALAQAIELPQVNMVFPVVASQLLGAGGAAMVFVVVFASLTSTLDSLLASTADLVAEDVVFKLLNPQLSDAELKRATRLVVIGLGVVTLALSWPRLDSLASVLFFTGALVASTIWPVAYGLYWRSANRVAAIAAMVAGSVCGLLAYTLIAPYCAALISAAVSALVMAVGTQLWPERFSWHILKEG

SEQ ID NO: 187 - protein, 479 aa, Synechococcus sp.
MVFSPTLAVQPFLAPGIAWALVVIFSVLWIALGVSWGRRGSGDADDYMLAGRNIGLALSTATLMASWVTGNTTLLAPEFGYRNGLWGMFSYALAGLGLVLFAPLALRIKTLMPKGRTSGDFIRLRYGRAAWWVFMVITAIYTLGFLVTQAMGAGILLEALSGFDYRLGMVVVIGVSTIYTLYGGMRAVVGTDFIQSLLIMGLLVLVAVLALQQFPVQELHRELAAQHPERLNLLLPAGLLIAWNSALFSMGEVFHNNIWWSRVFSSRASVVFASFVLGGLAWMTVPLVTGSIGLVALAQAVDLPQVNMLFPVVASQLLGAGGAALVFVVVFASLTSTLDSLLASTADLVAEDVVFKLLNPNLSDAQLRQATRLVVLGLGLLTLLLSWPRLDSLASVLFFTGALVASTIWPVAYGLYWPSANRWAAIAAMVSGSAVGLGAYFLIAPYCAALLSAAVSAVVMAVGTQLQPERFNWLTLKEG

SEQ ID NO: 188 - protein, 195 aa, Helicobacter_pylori
MLGLVLLYVGIVLISNGICGLTKVDPKSTAVMNFFVGGLSIVCNVVVITYSALHPTAPVEGAEDIVQVSHHLTSFYGPATGLLFGFTYLYAAINHTFGLDWRPYSWYSLFVAINTVPAAILSHYSDMLDDHKVLGITEGDWWAIIWLAWGVLWLTAFIENILKIPLGKFTPWLAIIEGILTAWIPAWLLFIQHWV

SEQ ID NO: 189 - protein, 271 aa, Actinobacillus_pleuropneumoniae
MFFSHWTLGVGCFLGALIGTYTASLLKYPQRQIEQGLYGFNASLAFMCVMFTFGLVDASNPMIWLNAVSASIVATLIMREFTKRNKIAFTFPFVFTCWIFCGAIAKYHFFDLSQTTPALADNTNTLQAIGEPFYVWAEVNFGSSIITGILLFLAISINSPMAAMYGLAAATIGTSFANQLLTVQPNQLANGIYGFSPILVACAFAGDRFRNFVYIILGSLLAVLIQFSISSLGIPSYTIGFIIASWLLLAVKSKLDKAAFDKNKLVRLLNP

SEQ ID NO: 190 - protein, 171 aa, Streptococcus_thermophilus
MLGVILLYVGMVLMSNGLHRLEGIPDKSNVVMNIFTGGLGLILNIIVIAYGACTGQGAEWFYGSATGLLFAFTYLYSAINTIFDFDQRLYGWFSLFVAINTLPAGILCLTSGYGGNAWYGIIWFLWGVLWLTAFIEINLKKNLGKFVPYLAIFEGIVTAWIPGLLMLWGKW

SEQ ID NO: 191 - protein, 173 aa, Oxalobacter_formigenes
MSSKRTGNIRRRFPMLGVTLLFVGIVLINNGACQLLKVDKKSTAALNVIVGFLLTFINFVAIYKGDYYAAGTGLLFAFTYLFVAANNIFNLNLKPYGIYSLFVAINTIPCAMLVASDDMRMTVIWIAWGILWFTGFIEGTLQKNLGKFVPYLAIVEGILTAWIPGFLMLAGKW

SEQ ID NO: 192 - protein, 172 aa, Lactobacillus_ruminis
MLGVVLLYVGIVLISNGFYAVEGIKDKSIVVMNFFTGGLGLILNIVSISYGVVAGKPESWFYASATGLLFAFTYLYVALNTIFDFDQRLYGWYSLFVAINSIPAGILCFRNFGGNWIYGIIWFAWGILWLTGFLSNNLKWNLGKFPGYLGIVEGILTAWIPGFLMLLNMWPK

SEQ ID NO: 193 - protein, 166 aa, Desulfotomaculum_nigrificans
MLGITLLYVGAVLFVNAMMLLGKVDGKSAAPMNFFTGGITLVMNIYIIIKASPSDPLSYYTAATGLLFSFTYLYVGINNALELSAKGLGWYCLFVAITAIPTAVITFHNGDFRFGAIWLMWSFLWFLYFLVLSLEKQLDKFTAYVTLVEAIITCWIPGYLLLIGRW

SEQ ID NO: 194 - protein, 287 aa, Zea_mays
MYPSPPPHLFYGVSVSRQHSPRSNRHFFNPLAKRAMAKFALGHHREASDAGCVRAVLAELILTFLFVFAGVGSAMATGKLAGGGGDTVVGLTAVALAHTLVVAVMVSAGLHVSGGHINPAVTLGLAATGRITLFRSALYVAAQLLGSTLACLLLAFLAVADSGVPVHALGAGVGALRGVLMEAVLTFSLLFAVYATVVDPRRAVGGMGPLLVGLVVGANVLAGGPFSGASMNPARSFGPALVAGVWADHWVYWVGPLIGGPLAGLVYDGLFMAQGGHEPLPRDDTDF

SEQ ID NO: 195 - protein, 303 aa, Zea_mays
MSTNSRANSRANFNNEIHDIGTAVHNSSSLPPAYYDRSLADMFPPHLLKKVVSEVVSTFLLVFVTCGAAGIYGSDKDRISQLGQSVAGGLIVTVMIYAVGHISGAHMNPAVTLAFAVFRHFPWIQVPFYWAAQFTGAICASFVLKAVLHPIAVLGTTTPAGPHWHSLIIEVIVTFNMMFVTLAVATDTRAVGELAGLAVGSAVCITSIFAGAVSGGSMNPARTLGPALASNLYTGLWIYFLGPVLGTLSGAWTYTFIRFEEAPSKDASSSHSQKLSSFKLRRLQSQSVAADADDDEELDHIQV

SEQ ID NO: 196 - protein, 295 aa, Zea_mays
MSTNSRSNSRANFNNEIHDIGTAQNSSMPPTYYDRSLADIFPPHLLKKVVSEVVSTFLLVFVTCGAAGIYGSDKDRISQLGQSVAGGLIVTVMIYAVGHISGAHMNPAVTLAFAVFRHFPWIQVPFYWAAQFTGSICASFVLKAVLHPIAVLGTTTPTGPHWHSLVIEIIVTFNMMFVTLAVATDTRAVGELAGLAVGSAVCITSIFAGAVSGGSMNPARTLGPALASNLYTGLWIYFLGPVLGTLSGAWTYTYIRFEEAPSHKDMSQKLSSFKLRRLQSQSVAVDDDELDHIQV

SEQ ID NO: 197 - protein, 251 aa, Arabidopsis_thaliana
MPIRNIAIGRPDEATRPDALKAALAEFISTLIFVVAGSGSGMAFNKLTENGATTPSGLVAAAVAHAFGLFVAVSVGANISGGHVNPAVTFGAFIGGNITLLRGILYWIAQLLGSVVACLILKFATGGLAVPAFGLSAGVGVLNAFVFEIVMTFGLVYTVYATAIDPKNGSLGTIAPIAIGFIVGANILAGGAFSGASMNPAVAFGPAVVSWTWTNHWVYWAGPLVGGGIAGLIYEVFFINTTHEQLPTTDY

SEQ ID NO: 198 - protein, 253 aa, Arabidopsis_thaliana
MPTRNIAIGGVQEEVYHPNALRAALAEFISTLIFVFAGSGSGIAFNKITDNGATTPSGLVAAALAHAFGLFVAVSVGANISGGHVNPAVTFGVLLGGNITLLRGILYWIAQLLGSVAACFLLSFATGGEPIPAFGLSAGVGSLNALVFEIVMTFGLVYTVYATAVDPKNGSLGTIAPIAIGFIVGANILAGGAFSGASMNPAVAFGPAVVSWTWTNHWVYWAGPLIGGGLAGIIYDFVFIDENAHEQLPTTDY

SEQ ID NO: 199 - protein, 250 aa, Arabidopsis_thaliana
MAGVAFGSFDDSFSLASLRAYLAEFISTLLFVFAGVGSAIAYAKLTSDAALDTPGLVAIAVCHGFALFVAVAIGANISGGHVNPAVTFGLAVGGQITVITGVFYWIAQLLGSTAACFLLKYVTGGLAVPTHSVAAGLGSIEGVVMEIIITFALVYTVYATAADPKKGSLGTIAPLAIGLIVGANILAAGPFSGGSMNPARSFGPAVAAGDFSGHWVYWVGPLIGGGLAGLIYGNVFMGSSEHVPLASADF

SEQ ID NO: 200 - protein, 249 aa, Arabidopsis_thaliana
MKKIELGHHSEAAKPDCIKALIVEFITTFLFVFAGVGSAMATDSLVGNTLVGLFAVAVAHAFVVAVMISAGHISGGHLNPAVTLGLLLGGHISVFRAFLYWIDQLLASSAACFLLSYLTGGMGTPVHTLASGVSYTQGIIWEIILTFSLLFTVYATIVDPKKGSLDGFGPLLTGFVVGANILAGGAFSGASMNPARSFGPALVSGNWTDHWVYWVGPLIGGGLAGFIYENVLIDRPHVPVADDEQPLLN

SEQ ID NO: 201 - protein, 247 aa, Nicotiana_tabacum
MAKIAVGSSREAIQPDCIQALIVEFICTFLFVFAGVGSAMAANKLNGDPLVSLFFVAMAHALVVAVTISAGFRISGGHLNPAVTLGLCMGGHITVFRSILYWIDQLLASVAACALLNYLTAGLETPVHTLANGVSYGQGIIMEVILTFSLLFTVYTTIVDPKKGILEGMGPLLTGLVVGANIMAGGPFSGASMNPARSFGPAFVSGIWTDHWVYWVGPLIGGGLAGFICENFFIVRTHVPLPSDESF

SEQ ID NO: 202 - protein, 254 aa, Brachypodium_distachyon
MAKLALGHLREAAEPGCARAVLAEAVLTFLFVFSGVASAMAAGKLGGGADTIMGLTAVASAHAMAVAVMVSAGLHVSGGHINPAVTLGLAAGGHITLFRSALYVPAQLLGSSLACLLLSFLSGSGAGAPPIPVHALAAGVGAAQGLLWEATLTFSLLFAVYATVVDPARTVGNLGPLLVGLVVGANALAGGPFSGASMNPARSFGPALVTGEWAGHWVYWVGPMIGGLLAGLVYDGVFMVRPGHQQLPTDDAEF

SEQ ID NO: 203 - protein, 249 aa, Brassica_napus
MKNIDLGNHREAAQPDCIKALIVEFITTFFFVFAGVGSAMATDSLVGNTLVGLLAVAVAHALVVAVMISAGHISGGHLNPAVTIGLLFGGHISVFRAFLYWIDQLLASSAACFLLSYLTGGMGTPVHTLASGISYTQGIIWEIILTFSLLFTVYATMVDPKKGSLDGLGPLLTGFVVGANILAGGAFSGASMNPARSFGPALVSGNWTDHWVYWVGPLIGGGLAGFIYENVLIDRSDAPLADDEQPFLN

SEQ ID NO: 204 - protein, 249 aa, Brassica_rapa
MKKIDLGNHREAAQPDCIKALIVEFITTFFFVFAGVGSAMATDSLVGNTLVGLLAVAVAHALVVAVMISAGHISGGHLNPAVTIGLLFGGHISVFRAFLYWIDQLLASSAACFLLSYLTGGMGTPVHTLASGISYTQGIIWEIILTFSLLFTVYATMVDPKKGSLDGLGPLLTGFVVGANILAGGAFSGASMNPARSFGPALVSGNWTDHWVYWVGPLIGGGLAGFIYENVLIDRSDAPLADDEQPFLN

SEQ ID NO: 205 - protein, 246 aa, Glycine_max
MAKIALGSTREATQPDCIQALIVEFIATFLFVFVGVGSSMVVDKLGGDALVGLFAVAVAHALVVAVMISAAHISGGHLNPAVTLGLLAGGHITIFRSMLYWIDQLVAAATASYLLYYLSGGQATPVHTLASGVGYGQGVVWEIVLTFSLLFTVYATMVDPKKGALAGLGPTLVGFVVGANILAGGAYSAASMNPARSFGPALVAGNWTDHWVYWVGPLIGGGLAGYIYETFFIDRSHVPLPRDEEN

SEQ ID NO: 206 - protein, 251 aa, Lotus_japonicus
MPIRNIAIGAPQEATHPDTLRSALAEFISTFIFVFAGSGSGIAYNKLTDDGAATPAGLISASIAHAFALFVAVSISANISGGHVNPAVTFGLFVGGNISFLRGVIYIIAQLLGSIVASLLLAFVTGLAVPAFGLSAGVGVGNALVLEIVMTFGLVYTVYATAVDPKKGSLGTIAPIAIGFIVGANILLGGAFDGASMNPAVSFGPAVVSWSWSNHWIYWVGPLVGGGIAGLIYEVVFIGSQTHEQLPTTDY

SEQ ID NO: 207 - protein, 251 aa, Oryza_sativa
MAKLALGHHREATDPGCLRAVVAELLLTFLFVFSGVGSAMAAAKLGGGGDTIMGLTAVAAAHALVVAVMVSAGLHVSGGHINPAVTLGLAAGGHITLFRSALYAAAQLLGSSLACLLLAALTGGEEAVPVHAPAPGVGAARAVAMEAVLTFSLLFAVYATVVDRRRAVGALGPLLVGLVVGANILAGGPYSGASMNPARSFGPALAAGEWADHWIYWVGPLIGGPLAGLVYEGLFMGPPGHEPLPRNDGDF

SEQ ID NO: 208 - protein, 251 aa, Physcomitrella_patens
MVKVAFGEANEASSADALKGAFAEFLALFLFVFIGVGSVMSYEKIHAGDMDAAGLLVIAIAHGLAIAVLVSATANISGGHINPAVSLGLALAGKITVIRLVLYWIAQLLGAAAGAWVLKIVTTGEDVARHAIGVGMTPWSAVLMEAVLTFTLVFVVFATAVDPKKGTVGVIAPLAIGFTVLAQIFVGAPFSGASMNPGRSFGPALVAMDFTNHWVYWVGPFIGAALAALIYDGVFISPSPPPGHHAIPSDF

SEQ ID NO: 209 - protein, 247 aa, Populus trichocarpa
MTKIALGSRHEAAQPDCLKALVVEFVTTFLFVFAGVGSAMAADKLTGDALLGLFVVAVAHAFVVAVMISAGHISGGHLNPAVTIGLLFGGHITVVRSILYWIDQLLASTAACFLLKYLTGGLATPVHTLASGMDYLQGVVWEIVLTFSLLFTVYATIVDPKKGSIDGLGPMLTGFVVGANILAGGAFSGASMNPARSFGPALVSWDWTDHWVYWVGPLIGGGLAGFIYENFFITRSHRPLPSEEEPF

SEQ ID NO: 210 - protein, 244 aa, Selaginella_moellendorffii
MARLTVGGADEYRQPDAMKAALAEFIGMFLFVFAGVGSAMAFAKLGGPILTPAGLVQIALAHGIALFVVIAATANISGGHINPAVTFGLAVGGHITIARGVLYWIAQLLGSVLAALVLKFTFLHEAVPIHAVGAHESVISALVIEIVTTFALIFTVYGTAVDHKRGVVGTIAPIAIGFIVLANILAAGPFSGGSMNPARSFGPALVTFDWTNHWIYWVGPLIGGGLAGLVYNEILITPPPPEEY

SEQ ID NO: 211 - protein, 250 aa, Setaria_italica
MAKFALGHHREAADAGCVRAVLAELILTFLFVFAGVGSAMATGKLGGGADSVAGLTAVALAHTLVVAVMISAGLHVSGGHINPAVTLGLAVTGRITLFRSALYVVAQLLGSVAACLLLAFLAGGAATPVHALAAGVGTLQGVLMEVVLTFSLLFAVYATVVDPRRTVGGMGPLLVGLVVGANVLAGGPFSGASMNPARSFGPALAAGVWADHWVYWVGPLIGGPLAGLVYDGLFMAQGGHEPLPRDENDF

SEQ ID NO: 212 - protein, 252 aa, Sorghum_bicolor
MAKFALGHHREVSDAGCVRAVLAELILTFLFVFAGVGSAMATGKLAGGGGDTVVGLTAVALAHTLVVAVMVSAGLHVSGGHINPAVTLGLAATGRITLFRSALYVAAQLLGSALACLLLAFLTAGGGGGVPVHALGDGVGALRGVLMEVVLTFSLLFAVYATVVDPRRAVGSMGPLLVGLVVGANVLAGGPFSGASMNPARSFGPALVAGVWADHWVYWVGPLIGGLLAGLVYDGLFMAQAGHEPLPRDDHF

SEQ ID NO: 213 - protein, 253 aa, Vitis_vinifera
MAKMALGSGREFAQPDCIRALVMEFIVTFLFVFAGVGSAMATEKLKGDSLDSLFFVAMAHALVVAVMVSAALQISGGHLNPAVTLGLCVGGHITVVRSVLYFIDQCLASTVACILLKFLTGGRATPVHTLASGVGCLQGVMLEFILTFSLLFTVYANIVSAQKSAHIDGLGPMITGLVVGANVMAGGAFSGASMNPARSFGPALVSWDWTNHWVYWVGPLVGGAVAGFVYENFFINRPHLRLPTRDEEEEEGF

SEQ ID NO: 214 - protein, 296 aa, Brachypodium_distachyon
MSTNSRSNSRANFSNEIHDMATPQNSNMPNMMYYNERSLADFFPPHLLKKMVSEVVSTFLLVFVTCGASAINGNDPSRISQLGQSVAGGLIVTVMIYSVGHISGAHMNPAVTTAFAVFRHFPWIQVPFYWASQFTGAICASFVLKAVLHPIEVLGTTTPVGPHWHSLLIEIIVTFNMMFVTLAVATDTRAVGELAGLAVGSSVCITSIFAGAVSGGSMNPARTLGPALASNRYTGLWLYFLGPILGTLSGAWTYTFIRFEDSPKDAPQKLSSFKLRRLQSQSVAAEDDDVLDHIPV

SEQ ID NO: 215 - protein, 301 aa, Brassica_rapa
MAPTEAEMGAVAVTAPPTPGTPGGPLITGMRVDSMSFDHRKPMPPCKCLPVMGHTWGQPDTCFTDFPSPVVSLTRKLGAEFVGTFILIFTATAGPIVNQKYDGAETLIGNAACAGLAVMIIILSTGHISGAHLNPSLTIAFAALRHFPWAHVPAYIAAQVSASICASFALKAVFHPFMSGGVTVPSVSVGQAFALEFIITFILLFVVTAVATDTRAVGELAGIAVGATVMLNILVAGPSSGGSMNPVRTLGPALASGNYRSLWVYLVAPTLGAISGAAVYTGVKLNDSATDPPHQVRSFRR

SEQ ID NO: 216 - protein, 295 aa, Glycine_max
MEGTTSQSTFTFIPSTIETPSPSIPEISSSSPSPGGSLARVAQSYPPGFPRKVFAEVIGTFLLVFVGSGSAGLSKIDESMVSKLGASLAGGLIVTVMIYSIGHISGAHMNPAVSLAFTAVRHLPWPQLPFYVAAQLTGAISASYTLRELLRPSDEIGGTSPAGSHIQALIMEMVSTYTMVFISMAVATDSNATGQLSGVAVGSSVCIASIVAGPISGGSMNPARTLGPAIATSYYKGLWVYFVGPITGAVLAAWSYNVIRDTEHPGFPISLSSISSKVRQSIGGTEQKSDQRCLV

SEQ ID NO: 217 - protein, 226 aa, Lotus_japonicus
MNAIDENKVSKLAASLAGGLIVTVMIYSIGHISGAHMNPAVSLAFATVRHFPWKQVPFYIAAQLIGAISASYTLQVLLAPAKQLGTTSPSGSNVQALIMEIVSTFTMVFIATASSIDTKAIGELAGVAVGSSVSIASIVAGPISGGSMNPARTLGPAIAGASYKGIWVYILGPVTGALLGAWSYSLIQDQGKPVLDISQSSSLSFLLRQKISEIEQISNNNHDCSA

SEQ ID NO: 218 - protein, 274 aa, Medicago_truncatula
MEEIDRSRSTSRLVTFTNELQNRITQKQSMYPLGFSKKVFAEVIGTYLLVFVGSGAAAMNSIDENKVSKLGASLAGGFIVTVMIYAIGHISGAHMNPAVSLAFATVKHFPWKQVPFYIAAQLTGAISASYTLRVLLEPSKQLGATSPSGSNIQALIIEIVTTFTMVFISTAVATDSKATGELAGVAVGSSVTIASIVAGPISGGSMNPARTLGPAIATSSYKGIWIYMVGPITGALLGAWSYVVIQETDHKQDLATSQSPLSVKIHNEMNGIEL

SEQ ID NO: 219 - protein, 298 aa, Oryza_sativa
MASTTAPSRTNSRVNYSNEIHDLSTVQSVSAVPSVYYPEKSFADIFPPNLLKKVISEVVATFLLVFVTCGAASIYGEDMKRISQLGQSVVGGLIVTVMIYATGHISGAHMNPAVTLSFAFFRHFPWIQVPFYWAAQFTGAMCAAFVLRAVLYPIEVLGTTTPTGPHWHALVIEIVVTFNMMFVTCAVATDSRAVGELAGLAVGSAVCITSIFAGPVSGGSMNPARTLAPAVASNVYTGLWIYFLGPVVGTLSGAWVYTYIRFEEAPAAAGGAAPQKLSSFKLRRLQSQSMAADEFDNV

SEQ ID NO: 220 - protein, 208 aa, Physcomitrella patens
MVNEISNGKVTSVGVSLAFGLVVTIMIYAVGHISGAHMNPAVTLAFAVARHFPWTQVPLYAAAQCIGSITASFMLRWILHPAAYEGATLPTGSDVQSFLLEIVITFILMFVIAAVSTDTRACGELAGIAVGSAVALNALMAGSISGASMNPARSLGPATASGNYHSLWVYMAGPTIGALMGMLTYNCIRLPNQAMQCACNKPAKSFRR

SEQ ID NO: 221 - protein, 278 aa, Populus_trichocarpa
MATVDQEMNISVESSRFHFVKLFREHYPSGFLRKVVAEVIATYLLVFVTCGAAAISASDEHKVSKLGASVAGGLIVTVMIYAVGHISGAHMNPAVTTAFAAVLNFPWKQVPFYAAAQLTGAISASFTLKVLLHPIRNVGTTSPSGTAVQALIMEIVVTFSMMFITSAVATDTKAVGELAGIAVGSAVCITSILAGPVSGGSMNPARTLGPAIASRYFKGVWVYLLGPVTGTLLGAWSYNLIRVTDKPVQAIPRRFSFGSRRTRAIDEQSPSMGPLDAF

SEQ ID NO: 222 - protein, 284 aa, Selaginella_moellendorffii
MAAAAAGMNDFQLSEIRVTPAPSIALPGNGHQIHHQASPPAASRGCFPVAIVPKSTLFQKIGAEVISTFILVFAGCGAAMVDAKYKDSITHLGVSAAFGLVVMIMVYAVGHISGAHMNPAVTLAFATVRHFPWQQVPAYIGAQITAAITAAFALRLIISPVANIGATIPAGSDLQSFYLEAIITYILMFVVSAVATDARAIGELAGLAIGATVGLNAIFAGPISGASMNPARSLGPAIAANNYSGLWVYIVGPTVGALAGACSYNMIRLPVKPDELPRAASFKR

SEQ ID NO: 223 - protein, 341 aa, Setaria_italica
MTATMPLDQCKQSKRAVSFFFLLLLLLFPVGTHVCSRTHVARSPEMSTNSRSNSRANFNNEIHDISTVQNSTMPPMYYSDRSLADFFPPHLLKKVVSEVVSTFLLVFVTCGAAAISASDLNRISQLGQSVAGGLIVTVMIYAVGHISGAHMNPAVTLAFAVFRHFPWIQVPFYWAAQFTGAICASFVLKAVLHPITVIGTTTPTGPHWHALVIEVIVTFNMMFVTLAVATDTRAVGELAGLAVGSAVCITSIFAGAVSGGSMNPARTLGPALASNLYTGLWIYFLGPVLGTLSGAWTYTYIRFEEAPSNKDAPQKLSSFKLRRLQSQSVAADDDELDHIQV

SEQ ID NO: 224 - DNA, 2040 bp, Selaginella_moellendorffii
atggcagatcaatgcccgccattagcgtgggctgctgactattacgttaccgtgaatggacagtgccagagacagagcagctacttcgggaatcgtccttctttgagccaaggtgtgggatacggagtcgtgcttggattcggagcattcttcgctttctttaccagcttcttggtgtggttggagaagaggtacataggagctaagcacaccagcgagtggttcaataccgcaggtcgaagcatcaaaacgggacttatcgcttcagtgatcgtctctcaatggacatgggctgctacgatcttgcagtcttcaaacgtggcttgggaatacggcgtgagtggacctttctggtatgcttctggcgccacgatccaagtgttgctcttcgggatcatcgcgatcgagataaaaaggaaggccccttctgctcacactgtttgtgagattgttagggctagatggggattcgaagcgcacatggtcttcctcagcttttgcttccttaccaacgtcatcgtgaccgccatgcttcttctcggaggcagtgctgtggtgaatgctctcactggtgtggacatctatgccgcgtctttcctcatccctcttggagtcatcgtgtacaccttggcgggaggtcttaaggccactttcttggctagctacatccacagcgtgattgtgcacgtggtcctcgtaatcttcgtgtacctcgtatacaccagctcaagcaaactcggcagcccgtctgatgtttacagaaagttggtcgctgcagccagcaaggaaagaatctgcagcgaacctcttagccatgctggtcaagcttgcggacctgttagcgggaactacggtggatcttatgtgacgatgctcagctcaggtggactcgtgtttgggatcatcaatatcgtgggcaacttcggaaccgtcttcgtcgacaacggatactggatgagcgctattgctgctaggccgtctagcacgcataaaggctacttattgggcggacttgtgtggttcgctgttccattcagccttgctacgagccttggattaggcgcgttggccttagacttgcctttgactgcttcagaagctggacatggccttgtacctcctgctacagcaaccgctttgatgggtaacagcggagccatcctcttgcttaccatgctcttcatggccgtcacttctgctggaagtagcgagctcgttgcagtgtcatcattgtgcacctacgacatctaccgaacatacatcaacccgaaggcgacaggcaagcaaatcctcagagtcagcagacttgtggtgctcagcttcggttgtttcatgggagtcctcgctgtggctttaaacaaggcaggcgtaagtctcggctggatgtacctcgctatgggtgtcatggtcggatctgctgtgatgcctatcgccttcttgttgctctggtctaaggctaacgctaagggtgccatcgcaggtacgatcgtagggtgcattgctggcgttactacctggttgtctgtgacgaaagctgagtatggtagagtgaacctcgacacgacagggagaaacgctcctatgcttgcgggtaacttagtgagtatcctcactggtggagcgattcacgcactcctttcttacctccaaccagagtcttacacctgggacaccaccaagaacatcacgatggtcgaggtcgacgataagcctgaggtgagcgaggaggagctctctgaagcgaagttgcagcacgctcgtaagtggatcatcaggtggggagtaggattcacgttgctcatcgcagttttgtggcctctcgcgtctttgccggctaaggagttcagcctcgagtacttcacattctgggccgtcatcgcaatcgtatggggcactgtaggcagcgttgtcatcatcctccttccgcttgtagagagctgggagaccatcatgctcgtgttgaagggtatgttcaccttcaactcaagccctgtcgagaccaagaagccacaccagaccggagttattgctggaccatag

SEQ ID NO: 225 - DNA, 2133 bp, Ostreococcus_tauri
atgactacgtgcgcacaatacgagaccttaacctctggcacatgtgtgagggacactagtttcttcggaggaaaggcagttttacctgagggagctggctatggaatcgtgatcggcttcggcctcttcttcagcttggcaacggctattgtgatgggacttgataagagatacggagggaccaacatcagcagcgagtacttcaacaccgcaggaagaaacgtgaagaccggactcacggcttctgtgattgtcagccagtggacgtgggctgcgaccttattgcagtcttctaacgtggcgtaccagtatggcgtgtctgggccattctggtacgcatctggagctaccatccaagttctcttgttcgggatgttggccattcaagtgaagcgttacgctccgaacgcccacacgatctgcgaaatcatcgatgctaggtggggaagcgacgtgcagaaggtattcatcttcttctgcttcctcaccaacgtcatcgtgtctagcatgttggtgcttggaggagcagcgaccgtgaacgctctcacaggaatgaacacaacggctgccggtttcctcatcccaatcggagtgatcgcttacacaatggctggcggactcaaggcaacgttcctcgccagctacatccacaccgcaatcatcttcgcgatcttgatcacgttcatctacatcgtgtacgctgccgatactaaacacgggctcggaagcccgtctaaggtgtatgacttgttgcagtctgtggctgccagaaatgtcacctctgcagactgcgtggcaagacttgctgctggacagaattgcggagctgtggctaaaaaccagaagggatcttaccttacgatgctcagcgagggtggcgtgatcttcgggatcatcaacatcgtcggtaacttcggaaccgtgttcgtggatcaaagctactggcagagcgctatcgctgctaagcctagcagctctaccaaaggatacctcctcggaggattggtgtggttcactatcccattcgccttagctacagctatgggattagcgaccgtcgctttggacttacctgtcacaggcgatgaggctgggaaaggcttagtgcctcctgcgattgccacacacttgatgggtaaaggcggagctgctgctatcaccatcatgttgttcatggccatcgtcagcaccggctctgctgagcagatagctgtgagctcactcttcgcctacgacgtgtaccgaaagtacatcaagccgaacgctactggagaggacatcctcagagtcagcagatacggagtggtcgcttttgggttgttcatgggcatcttgagccttatcttggacgagctcggtcttagcctcggtttcgtctacctcatgatgggaatcttcattggtagcgcggtaatgccgatctctttcgtgctcacctgggataaggcaaacgcgaagggagctgtggtcggtgctatatctgggcagatcttgggactcattacgtggatcgtgaccgcccagggattgtacaagagcgtcacgatcaagaccttgggagagaactacccgatgttggccggcaacatcgtcgcgatatgcagcagcgggatcattcacgccttcatgagcttccaagaccctcagaacttcgacttctctaccttgaacgacaggattcagctcatcgacgacaagttgccggagttcgagcaggacgaggacagcaaccctaaacaacttgaggctgctctcgcttggattcagaagtggggtctcagcttcaccttcgtcatgatcatcttgtggcctgtgttaagtttgcctgctggttgtggaaccagtgctggttgcggagttttcaataaagggtacttcaacctctgggtcggaattgcccttgcttggggtactgttgctaccgcggtgatcatctttctcccggtatacgagagttgggacagtattagcgtcgtgctcaagggaatgttcacgaacgacgacgtccacatgaggatggacgtgttggagaagaagatcgacgcattgctcgctcctggaagcgaaaagagcgctgagaacttgagccaacaacctggatacagagctaggttgatcgctggccacttatag

SEQ ID NO: 226 - DNA, 2148 bp, Micromonas sp.
atggcttcttactgcgcgtacgatagcccaactcctgagtactataccgatgccgctacttgtacgagacaggacagttttttcggcgggaaagccgttttgcctgagggcgctggatacggtatcgtgatcgggttcggagtgttctttagcctcgcgaccgggatcatcatgaagctcaaccagaggtacggagggctcaacctcagctctgagttcttcaacacggcagggagaaatgtcaagactgggttgactgcgagcgtcattgtgtcacagtggacgtgggcggctactttattgcagagctctaacgtggcctaccagtacggagtcagcggacctttttggtacgccagcggagcgactatacaggtgctcctcttcggcatgcttgctatccaggtgaagaggtacgcccctaacgctcacaccatctgcgagatcatcgatgctaggtggggaccaagcgtccagaaggtgttcatcttcttctgcttcatgaccaacatcatcgtgagcagtatgctcgttctcgggggagctgctactgtgaatgccctcacgggtatgtctaccaccgctgccggattcttgatccctctcggagtgattgcttacacgatgaccggaggcttgaaggcaaccttcttagccagctacatccacaccgccatcatcttcagcatcctcatcaccttcatctacatcgtctacgctggagacgacagcaagggattaggaagcccggacaacgtgtacaagttgctcaactctctcaccgctcaaacgaaggaggtttgcgctgacaggatcagcaagaagcagaactgtgggtacgtcccaaagaacgaggagggctcttaccttacgatgctcagcgagggtggtatgatcttcgggatcatcaacatcgtgggaaacttcgggacggtttttgtggaccagagctactggcagagcgcgattgctgctaagccttcaagctctaccaaagggtacttgcttggcgggttagtctggttcacgattcctttcgctttggctacctctatgggtttggctaccgtcgctcttgacctccctgtaacttctaccgaggctggtatgggattggttccaccagctgtcgcttctcaccttcttgggaagggtggagctgcagctatcaccatcatgctcttcatggctatcgtgtctacgggaagtgctgagcagatcgctgtcagcagcttgatcagctacgacgtgtacaggaagtatatcaacgtccacgccaccggagaggacattttgcgagtgagcaggtacggagtcgttttcttcggagtgtttatgggcctcctcagcctcattctcgacgaaataggcctcagcctcggattcgtgtacctcatgatgggtatcttcattggaagcgcggtgatgccgatcagctttgtcttaacgtgggataaggccaatggagcaggagctgtagcaggagctttcacaggacttatcttgggcttgatcacgtggatagctaccgcgagcggcttagaaggaaaggtgactgtggacacgcttggtatgaactacccaatgttggccgggaacgtcgtcgcaatatgtagctcagggatcgttcacgcgacgatgagcttcatgaaccctcagaacttcgattttagcaccctcaacgagagaatccagctcattgacgacactttgccaaagttcgaggaggacgaggagtctaaccctaagcagcttgaggagagcctcaagtggatacagaagtggggatggggattcaccttcatcatgatcatcgtgtggccgtgcttaagtcttttggctggttgtggaacgccgacaggttgcggagtgtttaacaagggttacttcaacttgtgggtcgccattgctctcacatgggggacggtggctactgccgtcataatcattctccctgtgtatgagagctgggctgagattagcaccacgcttcagggaatgttcacgaacgacgacgtgcacatgcgtatggacatcatcgactctaagcttgacagcctcttgaaagctgggaacctcggagagagcgggaataagttgagcaagacagatgcataccgtgcgaagctcctcgctggaaagttatag

SEQ ID NO: 227 - DNA, 1932 bp, Phaeodactylum_tricornutum
atgggtcaggactcttatttcggcggagagccaccgctctctgagggagttggatacttagttgtcttagggttcggcgccttgttcagcgtgattacgaccgctttggtgtggcgacaacgaaggtgctaccttggcgctctccaagtcagaaggttgaaccttaccgctgggagaagcgtaaaaaccgggcttacggcatctgtgatcgtgagccagtggacgtgggtcactcttttgcagagcagcaacgttgcatgggcctatggagtgagtgggccgttctggtacgcttctggagctaccatccaagtgttattgttcggcgtcctcgcgattaacctcaagaaggtggctccttctgctcacaccgtggctgagattgtaaatgctaggtggggaaagacggcccacttgaccttcttgtttttctgcttcgcagccaacatcatcgtgacgtcaatacttctcctcggaggcgctgctacagttgaagccctcaccggaatggactttagattggccagcttcctcattccgtggggagtgctcctctataccgctagtggaggacttcaagctacgttccttgcctcttacatccacacggtcatcatctacgccgtcctcatcaccatgatcttcctcgtgtacatcaagttctacagcagcgaccagatctacgactttctcgatcagacagtcagcttcaccaccgaagagtgtgaggcgatcttctctgacgactctggaactttcttcgaggccggaaaatatgcatgcggtccagtctctgggaacgaaaagggaagctacttgacgatgatcagcggcgatggattgatgttcgggatcatcaacatcgttgggaacttcggcacggtctttgtggaccagagctactggcaatcagcgatcgcggctaagccaagttctgccactagaggatatctcctcggaggcgtgtgctggttcgcgatcccattctcattggcgacgtctttgggattagcttctaccgccttgatgttgcctatcactagcaccgaggctggaaacggtttagtgccaccggctgttgcttttgagttgctcggagatgctggcgcaatcctcatcttaatcatgctcttcatggccatcgtctctaccggtagcgctgaatcaatcgcagtgagcagccttgttgcctacgacatctacagacagtacatcaacccggaggcgaccggagatcagattctcttcgtcagccgtgttgtgattgtcgttttcggcgtcttcatgggaggcttcgccatcttgttgtttgagattgggttaacgctcggatgggtctaccttttcatgggagtggtgatcggatcagctgtcgtaccattgtggaacatgatgacctggaaaaaggcttctgggcctggagctgtgattgctgcttggagcggcttagctctcgctttgacaggatggttagtcgctgctaaggtgcagagcggtaccatcagcgttgaggctctcggaaccaaccaggtgatgttgagcgggaacctcatcgctatattcagcagcggcattatccactacctctacagtacgttcgtggacccgcaagattacgacttcgctgagttggacactcacattaccttggttgaggaggactacagaggtctcacggaggaggagaaggacccggtcttacttaggcgtgcggagagatggattacgaggagaggttatgcgctcactctcttcttaatattcctctggccgctcttgtctatcccggctggagtcttcacgaaaagctacttcgccttctgggtgctcatcgctatcgcttggggattcggagctgctatcgttattacgatcctcccactcacggagtctgcggaggacatcaacatggtactcagcgggttattctag

SEQ ID NO: 228 - DNA, 1962 bp, Chlamydomonas_reinhardtii
atgcgtcctagaagtgctggagacacggctttaccagaagggttgggctggttcattctcatagggctcggagctgtgttcgctttggtgcctaccttcttgttgtgggcggacaggaagtttggaggaactcaagcggactctgagaattttgctaccgctggaagatcaatcaaggctggacttaccgcttgcgacattgtggctaaatggacctgggctgctaccttgttgcagagcgctaatgtggcttggagcttcggagtgtcaggacctttctggtacgctgctggagctactgtccaagtacttctcttcgcgatcctcgcagtggaaatcaagagaaaggcgccgacgattcataccttcctcgagatcatcaggtgcaggtggggaactactgcgcacgttatcttcgtgttctacggcttcctcacgaacatcatcgtgaccgccatgctcattcttggaggagctgcagttatggaagctctcacaggtgtgagcgtttacgcgagttctttcttgattccggctggtgtagtcatatacaccgcagttggagggctcaaaggaactgtggttgcggaatggttgaacgtctgtgtcatctacatcgccctcctcattttcatgttccaggtgtacgcgaccaacaaggacttgggaagcatcaaggtggtctacgaaaggctcacggctgttgctgagaaacaccctgtggctgacaacatgggagggagctacatgacgatgttcagcaagagcgggatcatcttcggcatcatcaacatcatcggaaacttcgggacggtgttcgtcgaccagagctattggcaaggagccatcgctgctaaaccatctgctacatacaaggggtacttgctcggcggaatgtgttggtttgctatccctttcacgttcgcaaccacaatgggacttggtgctcgtgcgttggacttgccattaaccaaagccgaggctaacaagggattagttcctcctgcattggctgtggcattaatggggcaaggtggcgcgttcttggtgacgttccagttattcatggccgtaaccgcgacggcttgtgctgaacaaatggctgtggctaccattgttgcctacgacatctacaagccgtacatcaacaagaacgccaacggaaagcagatgatcatccttcagagggtgatggtggtggtatacgccatcatctcaggcgtgatcagcgtgatcctcctcaagttgcaggtaagcctcgggtgggtttaccttttcatgggcatcgtgataggaagtgcggtcttcccaattgcggctagcttgacctgggcaaaatgttctgctaccgctgccatcgtcagcgccgttgttactacacctttggcgatcatgacgtggctcatcacggctgcgaagttgaacgacggcgtgataaacctcgataccaccggtcaagactacccaatgttagctgggaacctcgtggcgctcttcttcagcatgatcttgtgcatcatcctcagctacatcttcccgcaggacttcgactgggctgaactcaggaatatcccggtgatcgaatgtgaccctaacagcgaccctaacaacttcgagggagaggactctccggaagctttgaaccacgtgatcaagttcacgtgggcgactggagggacccttaccttggtgcttctcatcctctggccgatccttgccctcccagcgaaggtgtttagcgagggatacttcacgttctggatcatcatcgccatgatctggggtatcgtggccagttgcgtatgtatcgtgctcccgatctgggaggcgagcgatgtgattgtgaacttcttcacctggaagaaggcgcctgtagcaggcggtgtagctactactgccgaggaatcagctcacaagggagaccacatggaattgcctcctgctcctgctaacagagcttag

SEQ ID NO: 229 - DNA, 1467 bp, Bacillus_thuringiensis
atgttgacgctcaccagcatcagcatctacatgctcgggatgttggtcatcgggtacttcgcatacaagcgtaccagcaacctcaccgactacatgttgggaggcagaacgttaggtccagctgtgacggccttatctgctggagcttctgacatgagtggctggttgttgatggggttaccgggtgctatgttcagcgtgggattatctagcagctggatcgcgattggattgaccctcggcgcgtacgctaactggttgtacgttgctccgaggttgcgtacatacagcgagatcgccaacaacagcatcacgatcccggagtttctcgagcaccgattccacgacaagtctcacatgctcagattggtgagcggccttgtgatcatgatcttcttcaccttctacgtggcgtctggattagtctctggcgctgtcttgttcgagaacagcttcgggatgaactaccacgttggccttttcatcgtcgctggagtggtggttgcttacacattgtttggcggcttcctcgcagttagctggaccgatttcgtccagggaatcatcatggtggtcgctttgatcttagtcccgatcgtgaccatcatgaacagcaacggtttagggcctgctttcgacacgatcagatctgtggacccgaccaggttagacatcttcaagggcgcgagcaccctcggcatgatatctctcttcgcttggggtcttggatacgtgggtcagcctcacatcatcgtgcgtttcatggcgattagctctgtgaaggagctcaagtctgcccgaagaatcggcatgagctggatgattttcagcgtggtcggagccatgttcacagggctcatcggaatcgcttactacagccagcaggagcttacgttgtctaatccggagacgatcttcttggagctcggcaagatcctcttccacccattgatcacaggcttcctcctcgctgcaattttggccgccattatgagcacgatcagcagccagctcttagtgaccagcagcgctgttacagaggacctctacagaaccttcttcaagagaagcgcgagcgacaaggagttagtcttcgtcggaagaatggctgtgttagttatcgctctcgtgggatgtgctctcgctttcaagcagaacgacacgatcttggctttggttggatacgcgtgggctggatttggaagttctttcggacctgcgattctcctctctctctactggaagaggatgaccaaatggggcgctttagcagggatgatttctggcgcagtcaccgtgatcatctggacccagttcaagttcctcaaggacttcttgtacgagatgatcccgggcttcgctattagcctccttgctatcgtcattgtcagccttctcacgcagcctagcaaagaggtcaaggagcagttcgaggacttcgaaaagcagcacagacacaacttgtag

SEQ ID NO: 230 - DNA, 1437 bp, Geobacillus_kaustophilus
atgaacggcatcatactcgccgagctcgttctctattgcctcgtcatggctgccttaggctattggtacgggaagaaggagatgagccacagcgactttctcctcggcggaaaaaagttgcctggctgggcgttagctttttctgagagggcaaccggtgaaagtgcttggttgctcttaggctacaccggatttgtgttcgcatctggattgagtgctatttgggttgcggtcggtatcgtaattgggatcatcggtgcttggctctttctcgccgacagatttcgacaggaagctgagagatatggtgccttgaccctccctggatacttagccaagcgatttggagcacacggacagaccattctttggctcgcgaccgtcttgatcttcagcttcatgatgttctacttcagcgcgcagattgcgggagctgggaagaccttgttcaccgtcttccacattgatccagctctcggaatggtgatcagcgtcgccatcgtgattatcctctcttacaccggcggattcgtgtctgtcgtgtggaccgacatgatccagtctgtgttgatgttggcgaccctcgtgatccttccgatcgtcgctgttgtggaaatttattctggggggttgagcatctctgaggctcttcaccacgccaagcctggattagacagttggacaggcggagttaccggatttgctttggggttgttgctcttcaacaacttcgcgtggttcttcgggtatctcggaggacaaccacagctcagcgttagattcatggcactcaaggacgctagagaggctaagaccgcgaagaccgtagctatcgtgtggacactcttggcctacggaggcgctttcttaatcggacttgctgccatcgcgttgtatcaggggcagtcttttaccgacgtcgagaccgtgttgccgaaaatggtgctcgacctccttcctccgtggttagctggattactcctcagtggaatcttggccgccattgtcacgactgcagatagccagctcctcgtgattacgtctagcatcagcgaggacatcgtgagacgaagcttaaggttgagattgagcgagagacagcttgtggctttgagcagagccgtcgttgtgattgccggattgctcggacttgtgctcgccatgacctctgaaagtctcgtctacttcattgtgagctgggcgtgggctggtattggatgcactctcagcccggctattttgctcagcttcttctggaagaggtacagcggaatcggagccattgctaccattgtggcgggatttgtgtctaccgtgatctggattagctctcctcttgaggccatcatcagctctagatttaccaccagcgctatcgctttagttgccggtgtcctctttagccttctcttcccggacagacagagaaccatgtag

SEQ ID NO: 231 - DNA, 2112 bp, Pichia_angusta
atgttagaagcaccgcttccgcaaggtgctggatacgctgtggtggtgggcttaggatttgtgttcagcctcggcatgatcatgaccacgttcatccttcgtcgataccagaaggagatcattacagcagaggagttcgtagcggctggaagatctgtgaagaccggattaattgcagctgctgtggtgtcatcttggacttgggcagctacgttgttgcagagttgtacgcaggtctacaagaacggattctactacgctagcggcgctaccgtgcaaatcatcctcttcgcgttcatcgctatcaaggcaaagcagagagctccagaggcacacacgtacttggagattgtcaaggcacgttatggaacgacggctcacgctgtgtacatgttcttcgccatcgcaacgaacgtccttgtcaccgccatgttattaaccggaggatctgcggtgatcagcgaccttacgggcatgaacacggttgccgcatgcttcttgctccctgtaggtgtggtggtgtacactcttttcggaggaatcaaggccaccttcctcaccgactacgctcacaccatcgccatcatcgtgatcatcctcaccttcgccttcactacctatgttagcggtgacgtgctcggaagcacgtcaaaggtctatgacctcgtcattgaagctgcgaaagagaaacctattgagggaaacgccgagggaagctttctcaccatgaatagccgtagcggaggcatcttcttcgtgatcaacatcgtggggaacttcgggaccgtgttccttgacaacggatactggaacaaagccatcgcttcttctcctgctgctgctctcccgggatacatttttggaggccttgcatggtttgcggttccttggctcgtgtctaccacgatgggcttggcttgtgttgctttggagaagacaccggcattccctagctacccgaacttgttgaccgctgacgaagtctctgcgggtttggtgttgccttctgctgctgtggctatgatgggtaaaggtggagctgtggctgcgctcatcatggtattcatggcggtgaccagcgcgtcttctgctgaattcattgccgtcagcagtatcttcagctacgacatctacaagggctacatcaacccgagtgctagcggaaagaggttgattttcacgagccacgtctctgtcgtcgtgttcagcctcgtgatgtctggcttcgcgacaggattatggtacgctgggattagcatggggtacttgtacgagctcatggggatcattatcagtgccgccgtgttccctgctgctatgacgttgctcagcaagaagcagaatgtgcacgcagttgtgtggtctcctatcttgggcacggccttcgcgataatgagctggctcgtctgcaccaagaagaagttcggaagcatcaccgtgagcaacacattcgaggacgacgctatgctcactggcaacgtggttgccttactcagcccgcttatcttcgtgcctatcttaacgtacgccttcggatctcaggagttcgactgggagatcctcaagactatccgtcgtgtcgacgagacggaggagattattgaagccaccgagcctgttactgaggatgcagagttccagccggttaagagccacatgaccgcaattgctcacgacatctacgagcagaagaaggctactgctgcggctgaagaagaagagttgctcaggaaggcatctaagatcgccggctacacctgcttgttcatggctatcagcctcttggttctttggccgatgcctatgtacggcagcaaatacatcttcagcaagaagttcttcacgggatgggtgaccgtcggaatcatctggttgttcttcagcgccttcattgtcatcatctacccgctctgggagggtcgtcacgggatttacgtgagcatgagaggaatctactgggacttgacgggccaaacctggaagcttagggagtggcaaaacgagcacccggaggagttacacgtcgtaagatctcaggtgagcgcagagatcgcacatgaaagagcgggaggaattgaccaggcgatagagagattgagcgagaaagactag

SEQ ID NO: 232 - DNA, 2049 bp, Debaryomyces_hansenii
atgagcggaacggaggcaatacaactcctcaatcaaagcagcggctacggcatcctcgtaggagtaggagctttgttcgccatcgggatgatcctcacgaccaagttgttggaaaaatacctccacgaggacgccaaatcaacagaggtgttcatggtggccaacagatctgtcggcatcccgttattggcttcttctgtgtacctcagctggacttgggctacggagttattgtgggtttgcacgatggtctacaactacgggatcatggcttcatactggtacagcgctggattagctgtgcaaatctgcctcatggccgtgattggaatcgaggcaaagaagaagatccctgcttgccacacctctttggagatcgtggaattaagatacgggaaggcctgccacctcctctttatgttcctcagcttgaccaataatctcctcagctgctgcagcatgattgtcggagctgctggagccattagcatcatcgctggaaatttgcacatcgtggcgagcacgatgttgatcccgttcggagtgttgctctatactaccgtcggagggttaaaggccactttcctcaccgacttcgtgcacagcttcatcttgctcatcatcctctgctacgtggacaccgccattatcagcagcaaggagatcggaggtcttgacggcctctacgacttggtattaaagcacgagagcgacaggtacattgagggaaactacaacgggagcttcttgacgggcaagtcacagggagccatcttcttcgggattatcttaacgctcggcaacttcggcctcaccgtaatggacagcagcttctggcagaagtcattcagcgccaatacaaaagcgagcctcccgggctacctcatcgctgggtttttcatcgctgctaacgtgtggggactcggtagcatcgttggcttgagtagcatcgtcttggagggaactccgacttttccgacctaccctagaaagatgacgccttctgaggtctcttctggattcgtccttccgtacaccgtgaagggattgttagggaacggcggagtcggcgcaatcttgttggtgatctacttggctgtcacgtctaccgtgtctgcccaaatgatcagtgtgagcagcatcttgagcttcgacatctacaagaagtacatcaagccggatgcgcagaatcaccagatgatcagagtgagccacttcggcgtgatcttcttcgggttattcgcagcagggttcagcgtgatgctccactacgtgggagtcgacatgacctggctcggctacttctacagcatgatcatctgccctggagtcatcccgttggtgttcacgatcacctggtctagacagactaagctcgcggctttcatttctccgatcatcggcctcgtttgcggattggtggtgtggaccactacggcttcacactactacaacgaagttaccgtggcgtctttgggtggccagttaccttgcatgttcggaggattgaccgctcttttcttgccgggcatcgtcagcatcgtcgttagcctcacgattcgtccgcacaggttcgactggaatcaattaagaagggccgagttgatcatctctgaggaggacgagcacatcccgaaccaaaagatcgagttggatagcagcgaggaatcaaatgggaacaaggagatcatcgacaaggcgagccagaagacgaacatccgaaacaggtacgatgaaactgactctgacaacgtgtacgatgaactcttggagacggaggagcagaaaaataggttactcacgacctacctcaagttgggatacgccgcattcattttcgtactcttgatcacctgggtgctttggcctcttccgctctacagagactgggtgtggtcacgagcctacttcaaggggtatataaccgtcagcctcatttgggtgtacggagctctcctcgtgattggagtttacccattgatcgacggtcgacacagcgccaccaaaataatacgtggggtatataacgactacctcaagagggactag

SEQ ID NO: 233 - DNA, 1731 bp, Mycobacterium_smegmatis
atgtggatgaccaccacaaccacgttagctgctgacctcgccgctgagaatgtgttgagattatctgtgggggccatcgactacttgctcatcgccatctacttcgtgttcgtgttgggcatcggatacgtggctaggagccagattagcactagcttggacttcttcctctcaggcaggagaatgccagcttgggttaccggtctcgcgttcgtgagtgctaacctcggggctattgaaatcatggggatgagcgctaacggagctgagataggcttgagcaccatgcactactactggatcggagccgttcctgctatggtgttcctcggaatagtgatgatgccgttctactacgggagcaaggtgagatcagtgccagagtttatgagaagaaggttcggtccgggtgctcaccttgtgaacgcgatttctttcgctgttgctcaggtgttgattgccggagtcaacctcttcttgctcgccacggtcatcaatgtgcttttgggctggaaccagtggttgagccttattgtcgctgccctcatcgtcttaacctatactgctttgggcgggttatctgctgcaatctacaacgaggtgcttcagttcttcgtgatcctcgcgttccttgttccgttgaccatcttcggcttgatcaaggtcggaggttggagcgggttgaaggacaaggtgatcgacacaatgagcgatggcgctgttacggcctctgtcgatgagcagctcacaacttggccgggacaagctttgagcggatttagttctccggtctggagcgtcataggtattgtgttcgggttgggattcgtcctcagcttcggctattggacgaccaacttcgtggaggtgcaaagagcgatggccagcgacagcataagcagcgctagaagatctccaatcatagccgcattcccgaagatgttcatcccgttcgtggtggtcattccgggtatgattgctggagcggtcattggagatgtggtgcacctcaagtctacgggatcaggtgaagtcacctacaacgacgccatgctcgtgatgatcagggacattcttccaaacggcctcatcggagttgctatcaccggactcttggctagcttcatggctggtatggcagccaacattagcgctttcaacaccgtcttcagctacgacatctggcagcagtacgtcgtcaaggataggccggataactactacatcggcgtcggaagaattgctaccgtcgctgctaccatccttgctatcttcaccgcgctcattgctgcgggatactcaaacttgatggactacttgcagactctcttcggcttcttcaacgcgccattattcgccacgttcatcctcgggatgttctggagaaggatgacaagtaccgctggctggacagggttagtggcaggaaccttatctgctgtcacggttttccttttgggcgagtcaggcgtgataaatttaccagggcaaggcgttccttttgttgctgctgcagcggcattcgtagtggatatcgctgtcagcgtggtggtttctttggtgacgactccgaagccagctcacgagttagccggactcgtgtatagtgagaccccaagagagatattccacgacccggagagtgctggaaagccgtggtatcttcgtgctactccactcgctgctgttgctttaggactcgcagtcgtgttaaacatcgtgttccactag

SEQ ID NO: 234 - DNA, 1422 bp, Idiomarina_baltica
atgaccgagttcgctttggacactcagaccgcccttttcatcatcgtcgggtttgccctcgtctggattgctttcggagtttggttgggaaggaagaacaagagccacgaggacttcgcactcgctggcagaaatgtcggattcgctttcgccgcagctactgctatggctacttgggtgacgagcaatacaacgttggtggctccgcaattgacttaccaactcggcgtgtggggaatggttggctactcattcgctgctttaggtcttttgttgttcgcgccgatggcgaaacgaattaaacagctcctccctcagggatacacctctggcgattttgttcgtcttagatatgggaggttcgcttgggcggtgttcctcgtgatcagcgtggtatacgccttcggatggttagtgagcttaggaatggccggagggatcttgcttgaggccttaagcggcttagactactacatcggcatgaccatcatcttggcgatgtgcgtcggatatactttgttcggcggtctccgagctgtcattgcgacggatttcatccaagcgctcatcattattgttggcgtcgccgttgtggcttactggttgatcgacaatgtgggactcaccagcatacatacggagctcagcgaagcccatccgcaacttctcgacttgctctttcctgctgcggtgatgttcctcttcaataatatcttcttcggacttggagaaatcttccatagcaacgtgtggtggtctagagctctcagcttccgtaaggacgtggcttacaaagcatacttaacgggaggcttgctctggcttccaatccctgtcgtaactggtttcattgccttagctgctccgcaattgggcatatttccggctagcgcggatatgattggaccagctgtggctgcttctgttcttggtaagacgggcgctatcttggtgtttatcgtagttttcagcgccttagcttcttcactcgacagcttgctcgctgctagctctgacttggtgacccaggacatctaccataaattaattaagaagcacgcaagcgaccagcagctcatgcgtttcaacagatactgcttgctcggaatcggagtgatgacttggctcttgtgcttgccgcgtatcgccaccttaggtgcattgctcaacttcgccggagctttcgtggcttctaccatttggccgatcgttattgggctttactggcgtaggttgcaagggaccttcgctggaattgctatggccgctgggaccattgctgggctcattgcctacttctggatcggattctacgttgctgcactcgtcagctgcgcagttagcggtcttatctgcgccattggaatcgtcttcaacaagaggcagttcagctggcacgagctccaagaaaacggccaatag

SEQ ID NO: 235 - DNA, 2151 bp, Thalassiosira_pseudonana
atggcaacaccggctttcgagtgtcctacagatgtgtgccctccgatgttcgatcaatacgctggacaaacgagctacttcggaggagagagccctttaagcaaggctgtcgggtatcttgtggttgttggcttcggcgcgttgttctctatcttcacaactatggtggtgttcgccgacaagaagttcgctggaaacgctagcattacctctgagcacttcaacacagcaggcaggatggtcaagactggtcttaccgctagcgtgattgttagtcagtggacatgggcggctacactcttgcagtctagcaacgtcgcgtggaattacggcgttagtggtccgttttggtacgctagcggtgccaccatccaagtcttgctcttcggagtgttggctatttcattgaaggacatcgcgccgtctgctcacacaatgtgcgagatagttagggctaggtggggaaaaaccgcccacttaacgttcctcttcttcgctttctgcgcgaacattatcgtgacgtctatgttgctcctcggtggagctgcaactgtcgaagcgttgacaggagtcaactacgagctcgcctcattcctcattccgtggggagtgattctttataccagcgcgggaggattgaaggctactttcatggcgtcatacctccacaccatgatcatcttcgccgtgttgatcaccatgatcacgatcgtctacgtgaaggcttacagcagcgaccagatctacgattacctcgcgcagaccgttgcgtacacgaaggaggaatgcgagttgttattcagcgaggacggcaccgctgaaacctctttctacttgggcgaggacggaagtaaacagtacgcgtgcggttatgtgacgggaaacaactcagggagctacctcaccatgctcagctctgacggtctcatgttcgggatcatcaacatcgtcggcaacttcggcacggttttcgtcgaccaaagctattggcagtcagctatcgctgcaagacctcagtcagccgcaagaggatacttgctcggcggaatctgctggttcgctattcctttcagtttggcgacaagcttggggttagcaagcaccgctttaatgctcccaatcagcaagagcgaggcgggatctggactcgttccacctgctgtggctgatcacttgcttggatctgcgggttcagcccttatcctcatcatgttgttcatggccatcgtgagcactggaagcgctgaatctatcgcagtgtctagtttggtggcctacgacgtgtacagagagtactggaacccggaggctacgggcaaacagatcttatgggtgagcagggtggtgatcgtggtgttcgggatcttcatgggtctcttctcaatcgcgctcaacgagatgggtttgaacctcggatgggtgtacctcttcatgggtgttgtgatcggaagcgctgtgataccgttgtggaacatgatgacgtggtcaaaggctagcggcaagggtgctgtcatagctgcgtggtcagggttagttttggctctcatcggttggctcgtgggagcaaagattcaaggagaagccgttacggtggctactcttggaacgaacgaagtcatgttgagcggtaacctcatcgcgatcctcagcagcggattcatccactacgtgtacagcaagttcatcgatccgcaggatttcgactttgccacgttggacgagaacatccacctcgtcgaacaagatcttagcggtttgggagccgagcagcaagataagaacgagctcagaagggctaagagatggattgtcaggagaggctacctcctcaccttcgtccttattttggtgtggcctatcctctctgttccggctggcatcttcaccaaggactatttcgcgttttgggtgctcgtctcaattgcttggggcttcggtgcagctataattatcagcgtcctcccactcgttgaaagccaggaggagatagggaacgtcttcggaggtatgtggaactacatcagatgcaaggagggagacatcaaccagtatgctgaagaggaggctgctcctgctaaaacgctcgatgaggagcctacaaaagaagtggaagctgaagcgcctgctgctgatggagaggaagctgcttag

SEQ ID NO: 236 - DNA, 1545 bp, Bacillus_pseudofirmus
atgctcagcacgagcacgggatacttgatcctcttcatcttcgggagcttcttcaccatcttgacgatcgtcatgcagaggaggaggaagactgctatgaccgctgagcaattctctacggctggacgaaatgtcggagtcggattagcctctgcgagcatcatcgctgcatggacctgggctgctacattaatgatgagcagcagcaccggattccaatacggtatcagtggtccatactggtacgctgctggcgcttgcatccaagtactcttgttcgctatcgtggcgattcacttgaagcgaaaggcacctaaggctcacaccttcttggagttcattggcaagaggttcgacaagaataatcataaattaatgatggtgttcgccctcatgaccaacatcattgtgaccagcatggtgattctcggaggagccattgcgctcaacagcttgacgggaatgaacatctacatcgcggccttcctcatccctctcacgttcacgatctacacgatgatcggcggattgaaggccagcttcatcgcggactacctcaacaccgtgatgatcttcgtcatcctcaccatcttcgctgccgctgtctacatgcagttcggagtgcaaacggtgtacgagggactcaggtcattaccggagtctcagcagatgctcacgatggctagcatccctggactccttttcggcatgatcaacattatcggcaacttcggcaccgtattcgtggaccagagctactggcagagggctatcgcttctaaggacagcgctgccagcaaagcatacatctacggggggattgcttggttcagcatcccgttcgctatcgctacgttcttaggcgtcacggctgccggattgggattaaacgtgggagaccctgacgcgtctgcaccattaatggctgcccacgttttgggaacggtcgggagtatcttgttcctcgtcatgttgttcatggcggtcatgagtacaggcgctgccgaattaaccgccatcaccaacatcatcgtgaccgacatctaccgaaaatcaataaacccgctcgcgagtagcgccaaaacgctcaaggtgagcagaatcgtaacgctctctttcgggttagcgatgggcttcttctctatcctcctcttcagcattgggatcgggctcggtttcgtgtacatggcgatgggaatcttcgtcagcggagcggttattcctttgaccatcggcctcctttggaagagggccaccaataatggatgcttctggggagctctcttaggcatggtcagcggagtcacggtgtggaatgtgagcgcctacgtgatgcacggagcaataaatgtcgaaagcctcgggcacttgcacagcatgctcttcgggaacttgaccgtgttcatcgtgagcggagttataagcatcgggcacgccttgatgagcaacgagcaattcgacttcgaggcgatgaaagacagcttcaagagcttcgacgacgagcaggaggaattaattgtcgtggcgaagaaggaggtggtctag

SEQ ID NO: 237 - DNA, 1431 bp, Synechococcus sp.
atgagcgcagacgctgctccattcttagcgcctgggattgcttgggctttggtggtgttgttcagcgtgttgtggattgccctcggcatagcatggggtcgtagaggaaaaggagacgcggacgacttcatgttggctggacgaaacatcgggttggcgttgagtacggcgactttaatggctagctgggtgacaggaaacaccactttacttgcgcctgaattcggataccgtactggactttggggaatgttcagctacgctcttgctggactcggccttatccttttcgctcctcttgctgcacgtataaagcagctcatgccaaacggaagaacgagcggagacttcatccgtctcaggtacgggagacttgcgtggtgggtctttatggtcattaccgctgtgtacaccctcgggtttcttatgactcaggcgatgggagctggacttcttcttcaggctcttagcgggttcgattaccacgtgggtatggtagtggtgataggagttgccacagtctacaccctttttggcgggatgagggcggtgatagggaccgatttcatccagagcctcttgattatggttctcctcgcggttgttgccgtactcgcattcagacagttcccgatgcctgaggttcacgcacgtttgatagcagaacacccagacagattggatctcctcctcccagctggtcttctcatcgcttggaacagcgctctttttagcatgggcgaagtgtttcacaacaacatctggtggagccgagtcttcgctagcagaaggtctgtcgtgatgacgtcttttctcttgggcggattagcatggatgagcgtaccgttagtcactgggtctattggcttggtagctctcgctagagatcttcagctcgagcaggtgaatatggtatttccggtgatggccgctgacttattgggtgctggaggagctgctctcgtgtttgttgttgtgttcgctagccttacgagcactttggacagcttgctcgcttctacggcagaccttctcgctgaagatgtgtactttaggctcctcaggcctcaggctaacgacgcccagttgaaacaggctgctagattgatggttgtcggtcttgctgttgtcactgtggcgttatcttggccgcgtttggacagccttgctagtgtgttgttcttcactggagccctcgtcgcaagtacagtttggcctgttgcttgcggactttactggtcaagtgcaaacagatgggcggcaattgttgcaatggttgccggttcagcagttggattaaccgcctacgtcctcattgctccatactgcgctgctgtatttagcgctgccgtctcagctgttgtcatggtggtcgggtcaagacgtaagccagaacgattcgacttcaacctcttgaaagaggagggttag

SEQ ID NO: 238 - DNA, 2142 bp, Physcomitrella_patens
atggctagtacgggatgccctgcgaacctcccaggattggagtactacacctttgccaacggcgtgtgcagcagacaggacagctacttcggcggcaagcctttactctcacagggaattgggtacgcagtggtcttaggattcggagcgttgttcgcccttgtcacgagcttcttagtctggctcgagcagcgttacatcttctctaggcacaacagcgagtggttcaacactgccgggaggaacattaagaccgggctcatcgccagcgtcattgtatctcagtggacgtgggctgctaccatcctccagtcttctaacgtcgcttggcagtacggagtgagtggccctttctggtacgctagtggcgccacggttcaagtcttgttgttcggagtgctcgctatcgaaatcaagaggaaggcgcctggtgcacacacgatctgcgaaatcatcagagctaggtggggaaccgctacccacattgtgttcctctgcttctgcttcgccacgaacatcatcgtgacagcgatgctcctcttaggaggaagcgcggtggtcaacgccctcactggaatgaacctctacgctgctagctttctcatccctcttggcgtggtcgtgtacaccctccacggaggattgaaagccacgttcttagcgtcttacttacacagcgtgatcgtgcacgccgtgttggtggtcttcgtgttcctcgtgtacgtcacttctgagaagctcggaagcccgaaggacgtctatgctaagctccacagcgttgtggccattcaagactgcaccgcgcctttaaaccacaacacgcaagcatgtggcccagtgaagggcaacaacggagggtcttacctcacgatgttaagtacgggtgggttagtctttgggatcatcaacatcgtcggcaacttcggaaccgtgttcgtggacaacggctactggatgagcgctatagcggctagaccgtctagcacccacaagggatacttattgggcggcttagtctggttcgcggttccattcagcttggctacgtctttagggcttggaagccttgctctcggattgcctttgactgcagatgaagcaaaccacggcttggttcctcctgcgacggccactgcgcttttgggcaagagtggtgccattttgctcctcacgatgctcttcatggctgtcacgagcgccggttcttctgagctcatcgcgttcagcagcctctgtacctacgacatctaccgaacgtacgtgaacccgaaggctacgggaaagcagatcctctgggtgagcagacttatcgtactcttgttcgggtgtttcatgggagtgcttgcagtagtgttgaacaaggcgggagtgtctcttgggtggatgtacttagcgatgggggtgttcatcgggtctgcggtgatcccagtcgccttcctcctcttgtggcgaaaagctaacgccaagggcgcgatctgcggtagcatcattgggatgctcgccggagtcattacgtggttggtggtcacggccgtgatgtacaagagagtgaacttggacaccaccgggagaaacgctcctatgttggctggcaaccttgtctctattttgattggtggcgcagtgcacgctgtgatgagctttgtggctcctcagaactacaactgggacacgaccaagcacataacgatggtcgagttggacgcttctgacgttccggacgaggagtacagtgaggcgaagctcaagcacgccagggcgtggatcatcaagtggggcgtcggattcaccatcttgatcgtgattatctggccgatcttcgcgttgccggcgaaagtcttctctgagggctacttcaccttctgggctgccatcgcaatcatctggggaacggtcgggtcagccgtcataattttcctcccgttgtacgagagctgggacacgattagcttcatcgtgatgggcatgttcaccagcgacatcatgtacgagagactcgacgacatcagcagccgactcagagctatcatgacgagcatgccggaagcagaacgtctctacttgctcgagaaggagaagcacaagatagaggaggctaacgagagcatcatggccaaggagaaggagttgaacgacggttag

SEQ ID NO: 239 - DNA, 2235 bp, Lachancea_thermotolerans
atgccgtctagcctcgagggatctcctagcattgagacgttcaagcaggagatggctctcatcgagtctcctttacctcagggagccggttacgccgtggtcgtagggttagggtttgtcttcgcgttcggcatgatcctcacgacgtacatgctcaagcgttaccagaaggagatcatcacggccgaggagtttgctactgctggaagaaccgtgaagaccggattgattgcggctgcggttgtgtcttcttggacgtgggctgctaccttattgcagagcacggctatggtctacaaggtcgggattagcggcggatactactatggagccggagcctgcttccagatcatcgcttttgctgccctcgccatcaaagctaaacagcgagcgcctaacgctcacacgttcctcgagatcatctacgctaggtacggcaaggtggctcacatctgctacttgttctacgctctcgcgacgaacatactcgtgacggctatgctcttgactggagggagcgcagtagtgaacgacttgacggggatgaacacggtcgcggcgtgcttcttactcccgctcggcgtgatcgtctacactttgttcgggggcatcaaggcgacgtttctcaccgactacgtgcacaccatcgtcattatcgtgatcatcttgaccttcgccttcactgtgtacgctacgggtgacaaacttgggagccctggcaaagtctatgacttggtgagagccgctgcccaagcgcaccctattgagggaaacgctggaggcgagtacctcacgatgaggagcaagagcggcggaattttcttcgtgattaacctcgtcgggaacttcggaacggtctttctcgacaacggctactggaacaaggctatcagcgctagcccggctgcttctttaccgggatatgtactcggaggcgtcagctggtttgccattcctactctcatctcaaccgctatgggtctcgcttgcgtagcactcgagagcaacccgtcatttccgacataccctcagagattaacgtctgaccaagtgagtgccggcttagtattgccgagcgctgctgtgaccatcctcggtaagggaggcgctgttgcggctttacttatggtcttcatggccgtgacctctgcgatgtctgctgagctcatcgcggtcagcagcatcttcacctacgacatctacaggacgtacatcaacccgaatgcgaccgggaagaagctcatcttcagctcacacgcggcctgcattatcttcggattcagcatggccggattcgccgtgggattgtactacgctggagtctctatgggctacctctacgagctcatgggaattattatcagcgcagcagtgctcccggcttgtctcacccttttctggaagcagcagaaccttgctgccgtcgtgattagcccgattttagggacgggattggctatcatggcctggctcgtttgcgccaaatctcagttcaacgagattacgattgacagcaccttcgctgacgacccgatgttgactggaaacgtcgtggctctcctctctccgatggtgttcatcccgatcctcacctacgctttcaagccgcagaagttcaactgggacctcttgcaagtgatcacgagagctgacgagacggaagaaatcgaagcggcggagggtcaaacagagggagagaacggacaggtgtctgtgcgtggagacactagcgacagcggaaactctattgaggccaacgaccgagagaagctcgctgccgttaagtctgtgacgagcgctgctcaagaagtgcctgagacgcagatcgacgctatgaaaagagaggaggctgagagactcgaggtggctgggaaatggggaacctacctctgcatattcttcgcgctcgcccttcttgtcgtgtggcctatgccaatgtacggcagcaagtacatcttcagcaagaagttcttccgtggctgggtcgtggttctcatcatctggttgttccttagcggattctgcgtgtgcatctacccgttgtgggagggcagggaaggaatctataccacctgccgtgggatctactgggacttgacggggcagacgtataagcttagagagtggcagaactcacacccggagaagttgcacgttgtgcagtctcagatcagcgccagggctcatgctagcaggagatctttggacgggaatatcgacgacattgtgaactag

SEQ ID NO: 240 - DNA, 2061 bp, Ashbya_gossypii
atggaccaccttaaccctcctttaagccaaggcgtgggatacgctattgtcgtgggactcggagctgtcttcgcgatcggaatggtgatgacgacgtacatcttgaggagataccagagggaggtgattacggcggaagaattcgccaccgctgggagaaccgtgaagacgggattgattgcaagcgctgttgtgagcagctggacatgggctgcaaccctccttcaatctaccactatggcgtacaaggtaggagtctctggaccgttctactacgctgctggagcatgcgtgcagatcatcctctttagcaccctcgcaatcaaatgcaagcagcgtgcaccaaacgcccacaccttcctcgagatcatcaaggcccgatacggacgtaaggcgcacatcttgcacatgtgctacgcgcttgtcacgaatgtgctcgtcactacgatgttactcacgggaggaagcgcggtggtctctgagttgacgggaatgcacaccgctgctgcttgcttcctcctccctgtcggagtcatcatttacaccctcttcggcgggataaaagcgacattcctcacggactacgtgcacacggtgatcatcgtcggcatcattttgacgttcacgttcagcgtgtaccgtacgtctgacatgctcggcagtgctagcaaggtatacgacttgctccgtgaggccgctagacagcaccctgtcaagggaaacaggaacggtgagtacctcaccatgaagagcgagtctggcggaatcttcttcgtggtgagcctcgtcgggaacttcggaaccgtgctcctcgacaatggttacttcaccaaagcgttctctagtagccctgcagcagctttacctgggtacgtcgtcggtggtattgtttggttcgctatcccgtgcttagtggcaacgagcttagggttggcctgcctcgctttggagttgttgccaagcttccctaactacccttctaggctcagccaggagcaggtcgacgccggtttggttttacctgtcgccgctttcaatttgctcggtaagggaggagctatggccgcacttctcatggtttttatggccgtgaccagtgcaatgtctgctgagctcatcgccgtctctactatcttcacatacgacatctaccgtggatatgtgaaccctgacgctcctgggaagaggctcatcgtgacttcacacgcggcctgcgttgtgttcggtgtagctatgtctgccgtctctgtgggattatactatgcgggtattagcctcggctacctctacgaggtgatgggcatcatcatcagctctgctgttataccgtcagccctcaccctcttctggagcaagcaaaatatctacgccgtgaccatcgctccacttgtaggaacgaccttagctgtgacgtcttggctcgtttgcgctaaggtcttatacgggagcatcaccgtggaaaatacctacaaggactacccgatgttgaccgggaacctcgtggcccttcttagccctgctcttttgataccgctcttaacctactctctcggagctgacagctacgactggattgccatgaagaccgacatcctcagagtggacgagaccgatgaactcttggacgcggacaaagggttggctatggtggtcaccagagagttgttcgaaagtagcagcgtacctagcgccatcgagaaggaagaaatcaaccatactacggaaccgaatctccagagggagatgacgaacgggttggaggaggagaggattcttaagagagcgagcagactcgcaacgatcttatgcgccatcttcatcctctctttcctcgtgctttggccggtgccgatgtatggcaccggctacattttctcaaagggcttcttcactgggtgggttagcgtgttgaccctctggttattctgcactggattcgcagtctgcatctacccgttgtgggagggacgtcacgggttgttcaccaccgtcagagggatctactgggactgcacgggacagaaggcaaagctccgtgactggcagtgcagccagatataa

SEQ ID NO: 241 - DNA, 2049 bp, Tuber_melanosporum
atgtcttcacctccattaagccagggcttcggttacgggatcgtgctcgggctcggtttcgcattcgccttgggtatgattggcacgacctgggcgttgaagagataccagaacgaggtgcaaacgagcgagatgttcagcacggctggtaggacggtgcgtaccggattagtggcttctgctgtcgtgtcttcatggacctgggcagctacgttacttcagtcaagcggtatcgcttaccagtacggagtgagtgggccgttctggtatgcttctggagctaccgtacagatcctcctcttcgctacattggccattgagctcaagcgtaaggcgccgaacgctcacacgttcttggaggtgatccgtgcaagatatggagcagccacccacgtgacgtacatggtgttcggattattcaccaacatcctcgtaaccgcaatgctcttgacgggagggagtgctgtagtgaactctttgacgggcatgccgacggcagctgcttgcttcttgttgccagtcggagtagtcttgtacactctcttcggaggcatcaaggctaccttcctcaccgactacattcacaccgtcgtcatcctcgtagtgatcctcatcttcgcttttacgacctacgcgacgagcgacattctcggaagcccgtctaaggtctacgacctcctcgttgaggcttcagcgagacaccctgtcgcgggaaacgcaggcggtagctacttgacgatgcgtagcaaggagggcgcgatcttcttcatcatcaacatcgtcgggaacttcggaacggtctttctcgacaacgggtactacaacaaggctattgctgcatctccggtgtctgcgttacctggctacgtcttaggaggcttgagttggttcgcgatcccgtggttggctgccaccacgatgggattggcgtgcttggcacttgagaaccacccttcatttcctaccttccctgacagaatgcctgacgcggacgtgaaagcgggtctcgtcttacctaacgctgccgtcgctatgcttggtcaaggtggtgctgcgtgcacgttgctcttgattttcatggccgtgacatcagcctcttctgctgagctcatcgcggtttcttcaatcttcacctacgacctctaccagacctacttcaacccgagcgcgaccggcaagaagctcatcatcatgagccacacgatggtcgtagtgttcggagtcctcatggcggctttcagtacgggactttactacgctggagttagcatgggctacctctacctcctcatgggagtcattgtctctagcgccgtccttcctgcgtcattgaccttactctggaagggccagaacaaatgggctgccatgctcagtccaattctcggcttagcgtgtagcttggtggcgtggttggtcacgaccaaaaagcagttcggagagattaccgtgagttcttctggaagcaacgaccctatgctcgcgggaaacgtcgtggctcttctctctccgctcatcttcatcccgatcctcacccttatcttcggcatcgacaactacgactacgagtctatgagagcgatccgaaaaggagacgaccacgacattgctgctgaggcgcacattgacttggagttaatccctggagagagggctggaagcaacggcagcgagaccgaagaggtcgagcagaagaagctcgagaaggcagcgaagatcgccagaatcaccactgtcgtgatgaccctcatcctcctcgtgctttggccattcccgttgtacggcaccagctacatcttcagcaagaagttcttcaccggctgggtgtcagtcggcatcatctggctcttcttcagcatgttatgcgtcggcgtctaccctttatgggagggacgtcatgctatggcgcacacgacgaagagcatttggctcgacatcacgggtcagagaaggccgcctatccaaggaagaatggcagacgttgaggacgagaagcacacgaaggagttggacgagaagaagctcccaggaggcgcgacttctacctag

SEQ ID NO: 242 - DNA, 2061 bp, Penicillium_chrysogenum
atgagcagtgatggagtgattttcaccgcgccactcagcccgtcattcggatacgggataattctcggactcggcttcgcgttctctctcctcatgatcttcatcacctgggctctcaagagataccagaatgaggtgcagacaagcgagatgttcagcaccgctggaaggagcgtgaagtctggactcgtcgccgctgcagtcgtgtcttcttggacctgggctgctacgttattacagtcaagcgctgttgcttaccaatacggagtctctggcccgttcttctacgcctctggcgcttgcgtgcagatcttgcttttcgccaccctcgccattgaactcaagagaagggctccgaacgctcacacctttctcgaagtgattagggctcgttacgggacggtggttcacgtggtgttcatcgtcttctgcttgatgaccaacattctcgtcaccgcgatgctcttgaccggaggtgcagcggttatgacgagcttaacgggagtgcctacggctgctgcatgcttccttttgccgatcggtgtcgtgttgtatacactcttcggcgggatcaaggcgacgttcatcacggactacttgcacaccgtggtgatcctcgtggtgatattcctcttcgctttcagcgcctacgcgaccaacgcggaattgggaagcccttcaaaggtgtacgacgctttagtcgctgctagccagagacaccctgtggagggaaacgccgagggatcttacttgacgatgagaagcaaggagggcgggatattctggatcatcaacctcgtgggcaacttcggcacggtcttccttgacaacgggtactacaacaaggcaattgctgctagccctgtccacgctttccctgggtacgttatcggaggtatctgctggtttgcaatcccgtggctctgtgcatctacgatgggtctctctgctttggctttggagggaacacaaagattgtcttctggagatgtgacggcgggattggtgctcccgtttgcagcggtcaagttgctcggttattctggcgcggtggctaccaccttgatgatcttcatggcagtgaccagcgctttcagcgctcagctcattgccgttagcagcatcttcacctacgatatctacgccgcctatatcgacccgagcgctaaaggaaagagattagtgtggatctctcacatgagctgcatcgtgtacagcatcatcatggctggcttcgctaccggtctctactacgccggaatcgggatgggatacttgtacctcctcatgggagtgatcatcagcagcgccgtgtttcctggagccatgacgctcttatggaagggccagaacagaattgctgcggctgtcagccctcctctcggcctcgctgttagcttgatcgcttggctcgtcaccgctaagaagcagtatggaatcttaaccgtcgacaccaccggagctaactatcctatgctcgccgggaatgtggccgctttgctcagccctgtcatcttcgtgccgctcttcacctacgtcttcggacctcaaaactacgactacgagtctatgagggcgatcaggaaggtagacgatacggaggtcgccgctgcagctcacattgacctcgagttggtcccgggagaaatgggaccgacgcaagacgagagcgaagaagagacgaggcagctcaacagaagcgctctctacgccagaaccttgaccgtgttcatggcgttcagcttcctcattctctggccgatcccgatgtacgggagcagctacgtgttcagcaagaagttcttcaccgggtgggtcgtcgtgggcattatctggttgttcttcacgaccttcggagtcgtagtcttcccgttgtatgagggccgtgcctctatagtgagagtggtgaggatgatgtctttggacttagtcggcaagaagccaaaggtgtacagagggaccaaggccggagctgacgatgtggccacgccttctggagtagcaacaccgaccgagatgctcggtgaaaaggacaagcagacctcagaaagggaggtatag

SEQ ID NO: 243 - DNA, 2079 bp, Podospora_anserina
atggaccatgctcctgctgaccaggagcatattgcaaacgctacactcggacagggagctggatatggagtcgtgctcggattaggaggagctttcgccattggcatgattgccaccaccttcatcctcaagcgatacaacagggagctccagacaagcgagatgttcaacacggctgggagaaccgtgaagtcaggattggtggcagctgctgtggttagttcttggacgtgggctgctacattactccagagtaccggcgtttgctaccgatatggtgtgagcggacctttctggtatgctagtggtgccacggtgcaaattatcctcttcgcgaccctcgcgatcgagttaaagaggcgtgcaccaaatgctcatacctacctcgaggtcattaaggctagatatggcacggtcgctcatctcgtcttcatggtcttcggggtcataaccaacattctcgtcagcctcatgctcatcgttggaggaagtgcaacattgaacgccttgaccgggatgcataccatcgctgctatctatctcctcccgttgggtgtgatcgcttatacaatggtcggtgggttgaaggccacaattttgacggattgggcccataccttcatcctcctcttgatcatcatcatcttcgcgctcaccgcttacgctagtcacgacctcttgggatctccttcagctgtctacgacttgttggtagaggctgccacgagacatcctgtcgacggaaacaaggagggcagctacttgaccatgcaatctagagagggagccatcttcttcgtcatcaacattgtgggcaacttcggaactgtgttcctcgacaacggctactacaacaaagcgattgctgccagtccagtgcacgctttgcctgggtacataattggcggaatttgctggttcgctatcccttggcttactgcgaccacaatgggattagctgggttagccctcgagaacaaccctagattccctacctacccagacaggatgttagacagcgacgtgtcagctggtttggtcttaccttacgctgcggtcgctcttttggggaaaggaggagcaatggctaccctcttgatcgtgttcatggctgtgaccagcgctttcagtagtcagctcatcgctgtgagcacgatctgcacttacgacctctacagagcctacttcaagccggaggcttctgggaaacgtttgatctacatgagccactgtgtagttgtgggctacgggctcttcatcagcacgttctctgtcggactttggtacgctggcatcagcatgggttacctctacgtgatgatgggggtgattatcagcagcgcagtccttcctgctacacttgctctcttatggtctggtcagaacaaatgggctgctgctggtgcacctgttttgggcttagctacttctctcaccgcttggttagtgacgtcaaagaaacagtgcggtgagctcacggttcagtgcaccggaagcaacatccctatgttggcgggcaatgttgctgctttactcagcccggtcgtcttcatcgctattctcacggctatcttcggagtggacaagtacgactggaagagcatgttggagatccgtaggggagatgaccatgatttagcacaagaggcgggagtggacttagaggacgtgaacggaggtcacgaggaaactcaagctgagttcgaggctgagcagagcaagttgttaaaggccggcaagattagccgatggacaacggtgattttagcgctcgctttcttagtgctctggcctatgccaatgtacggcagcggatacattttcagcaagccgttcttcacgggctgggtgacaatcggaatcatctggatcttcgggagtttcatcggagtcggtcttttcccggtttgggagagtagagcaacgctcacccgtacctgcaagtacatttggaaggacctcaccgggaaaagccacattaagacgatccacgctcaagaagctgctgtcgttggaacaccaggagaccaaacacctccagagaaggctggattgaaggaggaggtcaggagctcttag

SEQ ID NO: 244 - DNA, 2166 bp, Oryza_sativa
atggctagtggtgtttgtcctcctgcagagttgggattcggtgccgaatactacagcgtggtgaacggtgtgtgttctcgtgcgggaagctacttcggaggtagacctgtcctcactcaagctgttggatacgcggtggtccttggttttggcgccttctttgctctctttacctcattcttggtctggttggagaagcgatacgtgggctcacaacacaccagcgagtggttcaacactgcagggagatctgtcaagaccggcttgatcgcatctgtgatcgtctctcaatggacttgggctgccacgatactccaaagctcaaatgtcgcctggcagtacggagttagtggacctttctggtacgcgtctggagccaccattcaagtgttgttgttcggcgtcatggccatcgagatcaagaggaaagctccaaacgcacatacggtctgcgagatcgtcagggctagatggggaactcctgctcatctcgtcttccttacgttctgcctcctcacgaacgtcatcgttacggccatgttgcttttgggcggatcagctgtggtaaacgcccttactggagtcaatgtctacgctgccagcttcctcattccgttgggagttgttgtatacaccctcgcaggtggtcttaaggctacgtttttggccagctacatccactcagtggttgtccatgctgtgctcgtggtgttcgtgtttctcgtgtacacctcaagcagtaagctcggatcacctagagtcgtgtacgaccgattgatggcagttgcttcagctgccagagactgttctgctgaccttagtcgtaacggacaagcttgtggtcctgttgctggaaatttcaaggggagctacttgaccatgctcagcagtggcggtctcgttttcgggatcatcaacatcgtcgggaacttcggcacggtctttgtggacaacgggtactggatgagcgctatcgctgctagaccatctagcactcacaagggatacttgcttggcggacttgtttggttcgccgtgcctttctctcttgctaccagccttggattaggcgcacttgctctcgacttaccactcacagctgctgaagccgccaaaggattagttcctccagccactgctaccgctttaatgggtaagagcggaagcgtgttgctcctcacgatgctctttatggctgtgacctcagctggtagtgctgaacttgttgccgtctcttcactctgcacctacgacatctacaggacctacctcaatcctggtgcttcagggaagcagatcttgagagtaagcagggccgttgtacttgggtttggatgcttcatgggcgttctcgccgttgttcttaatgtcgcaggagtcagcttagggtggatgtatttagcgatgggcgtgatcgtcggatctgcggttatcccgatcgcactccttttgctttggagcaaggccaacgctgttggtgctatgggaggagctgtttctggttgcgctttaggtgtcgctgtttggcttaccgtcgctaaagtccagtacggacgagtgaacttagacactacgggccgaaacgctcctatgttagctggcaacctcgtctctatcctcgtgggaggagctgttcatgctgcttgtagtttgcttaggccgcaacactatgactggggcaccagcagagagatgattacgaccgtggagagcgttcacgctgctttagacgacgagttgaaggaggagcgtctcgttcacgcgaaaaggtggatcgtaaggtggggcttggtgtttaccgctgtgatcgtggtagcctggcctgctttatctttaccggctagaaggtactctctcggctatttcaccctctgggctgctgtcgctattgcttggggcactgttggatcagtggttatcatcttactcccggtggctgagagttggaccacaataacgaaggtctgtgccgggatgttcacgaacgatgctgtttatgaccgactcgacgacgtgaacttgaggttgagagcaatcatgggtgctatgcctgaggcagagaaaaggtacagacaacttcatgagacagagatgcaccctgctggaactcatccagctaacgacgacgacgacgacaataataataatcagatgatgcacagctag

SEQ ID NO: 245 - DNA, 588 bp, Helicobacter_pylori
atgttgggattggttttgttgtatgttggaattgttttgatttctaatggaatttgtggattgactaaggttgatcctaagtctactgctgttatgaatttttttgttggaggattgtctattgtttgtaatgttgttgttattacttattctgctttgcatcctactgctcctgttgaaggagctgaagatattgttcaagtttctcatcatttgacttctttttatggacctgctactggattgttgtttggatttacttatttgtatgctgctattaatcatacttttggattggattggagaccttattcttggtattctttgtttgttgctattaatactgttcctgctgctattttgtctcattattctgatatgttggatgatcataaggttttgggaattactgaaggagattggtgggctattatttggttggcttggggagttttgtggttgactgcttttattgaaaatattttgaagattcctttgggaaagtttactccttggttggctattattgaaggaattttgactgcttggattcctgcttggttgttgtttattcaacattgggtttaa

SEQ ID NO: 246 - DNA, 816 bp, Actinobacillus_pleuropneumoniae
atgtttttttctcattggactttgggagttggatgttttttgggagctttgattggaacttatactgcttctttgttgaagtatcctcaaagacaaattgaacaaggattgtatggatttaatgcttctttggcttttatgtgtgttatgtttacttttggattggttgatgcttctaatcctatgatttggttgaatgctgtttctgcttctattgttgctactttgattatgagagaatttactaagagaaataagattgcttttacttttccttttgtttttacttgttggattttttgtggagctattgctaagtatcatttttttgatttgtctcaaactactcctgctttggctgataatactaatactttgcaagctattggagaacctttttatgtttgggctgaagttaattttggatcttctattattactggaattttgttgtttttggctatttctattaattctcctatggctgctatgtatggattggctgctgctactattggaacttcttttgctaatcaattgttgactgttcaacctaatcaattggctaatggaatttatggattttctcctattttggttgcttgtgcttttgctggagatagatttagaaattttgtttatattattttgggatctttgttggctgttttgattcaattttctatttcttctttgggaattccttcttatactattggatttattattgcttcttggttgttgttggctgttaagtctaagttggataaggctgcttttgataagaataagttggttagattgttgaatccttaa

SEQ ID NO: 247 - DNA, 516 bp, Streptococcus_thermophilus
atgttgggagtcatcctcctctacgtcggcatggtcctcatgagcaacgggttgcacagactcgagggcatcccggacaaatcaaacgtcgtgatgaacatcttcacgggtgggctcgggctcatcttgaacatcatcgtgatcgcctacggggcttgtacgggacaaggagctgaatggttctacggaagcgccaccggactcttgttcgcgttcacgtacctctacagcgcaatcaataccatcttcgacttcgaccaaaggctttacggctggttcagtctcttcgtcgcaattaatacgttgccggctggaattttgtgcttgaccagcggatacggaggaaacgcttggtacggaatcatctggttcctctggggtgttctttggctcacggccttcatcgaaattaatctcaagaagaatctcggcaagttcgtcccgtacctcgccatctttgagggtatcgttacggcctggattcctgggctcttgatgttgtggggaaagtggtag

SEQ ID NO: 248 - DNA, 522 bp, Oxalobacter_formigenes
atgagtagcaagagaacgggaaacatcaggaggagattcccgatgttgggcgtgaccttgttgttcgtgggcatcgtgctcatcaacaacggcgcttgccagcttcttaaggtcgacaagaaaagcactgctgcgctcaacgtcatcgtcggattcctcttgacgttcatcaacttcgtggccatctacaagggagactactacgctgctggtacgggcttattgttcgcgttcacgtatctcttcgtggccgctaacaacatcttcaacctcaacctcaagccgtacggcatctacagcttgttcgttgcgatcaacaccatcccgtgcgcgatgttagttgctagcgacgacatgaggatgaccgtgatttggattgcctggggaattctctggtttactgggtttatcgagggcaccctccagaagaacttaggcaagttcgtcccgtacctcgctattgtggagggcatccttactgcttggattcctggcttcttaatgctcgctgggaagtggtag

SEQ ID NO: 249 - DNA, 519 bp, Lactobacillus_ruminis
atgcttggtgtggtcttactctacgtcggcatcgtcctcatttctaacgggttctacgccgtggagggaattaaggacaagagcatcgtggtcatgaacttcttcaccggaggtcttggtctcatcctcaacatcgtgagcatcagctacggagttgtcgctggtaaacctgaaagctggttctacgcgagcgcgaccggactcttattcgccttcacctacctctacgtggccttgaacacgatcttcgacttcgaccagaggttatacggctggtacagcctttttgtcgcgatcaacagcatccctgctggaatcctctgcttcaggaacttcggagggaactggatttacgggatcatctggttcgcgtggggaatcttgtggctcaccggattcctcagcaacaacctcaagtggaacctcggaaagttcccgggctacttaggtatcgttgagggcatcctcaccgcctggattccgggattcttgatgctcctcaacatgtggccgaagtag

SEQ ID NO: 250 - DNA, 501 bp, Desulfotomaculum_nigrificans
atgctcgggatcaccttgttgtacgtcggtgcggtcttattcgtcaacgcgatgatgctcttggggaaggtcgatggaaagagcgctgcgccgatgaacttcttcaccggaggaatcacgctcgtcatgaacatctacatcatcataaaagcgagcccgagcgaccctcttagttactatacggctgctactggcctcctcttctctttcacctacctctacgtgggaatcaataacgcgctcgaactcagcgccaagggattaggttggtactgcttgttcgtcgcgattacggccatcccgaccgctgttattacgttccacaacggcgactttaggttcggagctatttggctcatgtggagcttcctctggttcctctacttcttggtgttgagcctcgagaagcagctcgacaagttcaccgcctatgtcactttggtcgaggccattatcacctgctggattccgggatacctcctcctcattggaaggtggtag

SEQ ID NO: 251 - protein, 1835 aa, Saccharomyces_cerevisiae
MTVSSDTTAEISLGWSIQDWIDFHKSSSSQASLRLLESLLDSQNVAPVDNAWISLISKENLLHQFQILKSRENKETLPLYGVPIAVKDNIDVRGLPTTAACPSFAYEPSKDSKVVELLRNAGAIIVGKTNLDQFATGLVGTRSPYGKTPCAFSKEHVSGGSSAGSASVVARGIVPIALGTDTAGSGRVPAALNNLIGLKPTKGVFSCQGVVPACKSLDCVSIFALNLSDAERCFRIMCQPDPDNDEYSRPYVSNPLKKFSSNVTIAIPKNIPWYGETKNPVLFSNAVENLSRTGANVIEIDFEPLLELARCLYEGTWVAERYQAIQSFLDSKPPKESLDPTVISIIEGAKKYSAVDCFSFEYKRQGILQKVRRLLESVDVLCVPTCPLNPTMQQVADEPVLVNSRQGTWTNFVNLADLAALAVPAGFRDDGLPNGITLIGKKFTDYALLELANRYFQNIFPNGSRTYGTFTSSSVKPANDQLVGPDYDPSTSIKLAVVGAHLKGLPLHWQLEKVNATYLCTTKTSKAYQLFALPKNGPVLKPGLRRVQDSNGSQIELEVYSVPKELFGAFISMVPEPLGIGSVELESGEWIKSFICEESGYKAKGTVDITKYGGFRAYFEMLKKKESQKKKLFDTVLIANRGEIAVRIIKTLKKLGIRSVAVYSDPDKYSQHVTDADVSVPLHGTTAAQTYLDMNKIIDAAKQTNAQAIIPGYGFLSENADFSDACTSAGITFVGPSGDIIRGLGLKHSARQIAQKAGVPLVPGSLLITSVEEAKKVAAELEYPVMVKSTAGGGGIGLQKVDSEEDIEHIFETVKHQGETFFGDAGVFLERFIENARHVEVQLMGDGFGKAIALGERDCSLQRRNQKVIEETPAPNLPEKTRLALRKAAESLGSLLNYKCAGTVEFIYDEKKDEFYFLEVNTRLQVEHPITEMVTGLDLVEWMIRIAANDAPDFDSTKVEVNGVSMEARLYAENPLKNFRPSPGLLVDVKFPDWARVDTWVKKGTNISPEYDPTLAKIIVHGKDRDDAISKLNQALEETKVYGCITNIDYLKSIITSDFFAKAKVSTNILNSYQYEPTAIEITLPGAHTSIQDYPGRVGYWRIGVPPSGPMDAYSFRLANRIVGNDYRTPAIEVTLTGPSIVFHCETVIAITGGTALCTLDGQEIPQHKPVEVKRGSTLSIGKLTSGCRAYLGIRGGIDVPKYLGSYSTFTLGNVGGYNGRVLKLGDVLFLPSNEENKSVECLPQNIPQSLIPQISETKEWRIGVTCGPHGSPDFFKPESIEEFFSEKWKVHYNSNRFGVRLIGPKPKWARSNGGEGGMHPSNTHDYVYSLGAINFTGDEPVIITCDGPSLGGFVCQAVVPEAELWKVGQVKPGDSIQFVPLSYESSRSLKESQDVAIKSLDGTKLRRLDSVSILPSFETPILAQMEKVNELSPKVVYRQAGDRYVLVEYGDNEMNFNISYRIECLISLVKKNKTIGIVEMSQGVRSVLIEFDGYKVTQKELLKVLVAYETEIQFDENWKITSNIIRLPMAFEDSKTLACVQRYQETIRSSAPWLPNNVDFIANVNGISRNEVYDMLYSARFMVLGLGDVFLGSPCAVPLDPRHRFLGSKYNPSRTYTERGAVGIGGMYMCIYAANSPGGYQLVGRTIPIWDKLCLAASSEVPWLMNPFDQVEFYPVSEEDLDKMTEDCDNGVYKVNIEKSVFDHQEYLRWINANKDSITAFQEGQLGERAEEFAKLIQNANSELKESVTVKPDEEEDFPEGAEIVYSEYSGRFWKSIASVGDVIEAGQGLLIIEAMKAEMIISAPKSGKIIKICHGNGDMVDSGDIVAVIETLA

SEQ ID NO: 252 - protein, 1838 aa, Naumovozyma_dairenensis
MTNQQSTNYLGWSIEGWITFHKKSTPTESYNLLISLINSQFVAPTDPAWVSVCSIENFNHQWQILQTKSNKELLPLYGVPIAIKDNIDAKGIPTTAACPSFSYNPERDSKVVSLLRDAGAIIIGKTNLDQFATGLVGTRSPYGKTPCVFNKDYVSGGSSAGSASVVARGIVPIALGTDTAGSGRVPAALNNLIGLKPTRGVLSCQGVVPACKSLDCVSIFALNLSDAERCFKILCQFDGDNDEYSRLYPSNPLQKFPKNLTIAIPKTVPWYGEIENPKLYSNAIASLKETGANVVTIDFEPLLELAKCLYEGPWVAERYNAIRDFLATNPPNDTLDPIVMSIIKGATSFDAADAFKFEYKRQGILQKVNKLLKDIDVLCVPTCPLNPTFEEVTNEPILINSRQGTWTNFVNLADMAALAIPTGFRNDGLPNGITLIGRKFTDYALLDLAKRFFKVTYPNGSRSFGIFKDYKVDTKDDNLVGPDFSIADSIKLAVVGAHLKGLPLHWQLERVNAVYLSSPKTSRNYVLYALPKVGPILKPALRRVDFSKGSQIQLELYSVPKENFGTFISMVPEPLGIGSVELENGEWVKSFICEESGYKQKGSVDITSYGSFKTYVESLKSTESSNKKCFDTVLVANRGEIAVRIMKTLKKMKIKSVAVYSDLDKYSQHVTDSDDAVPLHGSTAAETYLNIDKIINAAKVSGAQAIIPGYGFLSENADFSDRCAEEGIIFVGPSGEIIRNLGLKHSARNIAEAAHVPLVPGSSLIKSATEAKEVAAALEYPVMVKSTAGGGGIGLQKVDNEADIERVFETVQHQGKSFFGDSGVFLERFIENARHVEVQLMGDGYGNAIALGDRDCSLQRRNQKVIEETPAPNLPDGTKFKLREAAENLGKLLKYKGAGTVEFIYDERRNEFYFLEVNTRLQVEHPITEMVTGLDLVEWMIRIAADDPPDFASTNITVTGASIEARLYAENPVKGFKPSPGQLTDVSFPEWARVDTWVTAGTVVSAEYDPTLAKLIVHGKDRNDAISKLIQALDETKLYGCVTNIDYLKSIVSSDMFKEARVSTNVLNFYDYAPSAIEITSPGAHTSVQDYPGRTGYWSIGVPPSGPMDAYSFQLANRIVGNDSEAAALEITLTGPTVIFHTQTVISITGGICPCMVNDEPIEQNKPISISKGDELSIGRLITGCRAYLAIRGGLDIPEYLGSRSTFTLGTIGGYNGRVLKLGDVLFINQFDSASSSQVSKYHPQSVPSSLIPSISNDKEWLIGVMCGPHGSPDFFTSEYADEFFNEKWKIHYNSNRFGVRLIGPRPKWARKDGGEGGLHPSNAHDYVYSLGAINFTGDEPVIVTCDGPSLGGFVCHGVVPEAELWKVGQVKPGDTVQFIPISYQVARELKLSQDYSISSFEPNSLKRLTLDMGLLEVQDPVLKRIPHRSNLSPMVTYRQAGDRYILVEYGENKMELDICYRIHCLIKLVKKNNTMGVVEMSQGVRSVLVEFDPYKISQDELLYTLNAYEQEIYFTQDWTVKSNIIRLPMAFEDSKILSCVKRYQESVRSSAPWLPNNVDFIADINGVSREYIHDMVYSARFMVLGLGDVFLGSPCAVPLDPRQRLLGSKYNPSRTFTERGAVGLGGMYMCIYAAASPGGYQLVGRTIPIWDKLMLSTSSANTGQPWLLNPFDQIEFYPVSEEELDNFTAACDQATFTVDIEPSIFSHKDYLRWVEDNKESIEDFTKAQSGEKANEFARLMEASNVELEKTKQCIVVEKEDYPEGSLLVYSEYSGRFWKSAVSVGDEVDVSKGLIILEAMKTEMLVPSPYKGKLLKICHKNGDMVDSGDLVAVIQPVQ

SEQ ID NO: 253 - protein, 1833 aa, Zygosaccharomyces_rouxii
MTKDLSELTKGWSACEWVEFHLKSVPNASYELLLNLLKSQKCAPEDPAWISLVSESNLQQQWQVLQSKSKKESLPLYGVPIAIKDNIDVYGVETTAACPSFAYKPTKDSKVVELLRDAGAIIIGKTNLDQFATGLVGCRSPYGKTTCAFSDKHVSGGSSAGSGAIVARGVVPLALGTDTAGSGRVPAALNNLIGLKPTRGVFSCKGVVPACKSLDCVSIFALNLSDAERAFKVLCQPDESNDEYSRPFTPNPLRSYPNDVCIAVPKTVPWFGETENPKLYANAIESLRLMGARVVTIDFEPLLELARCLYEGAWVAERFEALRDFLATDPPSDSLDPTVTKIIKSGANYSAADAFKFEYKRQGILRKVESLLQGIDVLCVPTCPLNPTLEDLENEPVLVNSRQGTWTNFVNLADMSALAIPAGFRPDGLPNGVTLIGKKFTDYALLDLAKRYFQTKYPGGTRNYGIFTERHVGTMDDELTGPDVTESKSIKLAVVGAHLKGLPLHWQLEKCNATYLSSPKTSKNYKLYALPKTGPVLKPGLRRVDEVAGSQIQLELYSVPLEKFGTFMSMVPEPLGIGSVELENGEWVKSFICEEVGYAAKGSVDITPLGGFKPYIEHLQKEGAKVQRPFKTVLVANRGEIAVRIIKTLKKLNITSVAVYSDPDRYAQHVLDADIAIPLHGVSSTQTYLDIEKIIRAAKETNTEAIIPGYGFLSENADFSDRCAVEGIVFVGPTGDAIRKLGLKHSAREIAAKAGVPLVPGSPLVTSPSDAKKIAAELEYPIMVKSTAGGGGIGLQKVDSEDQIERVFETVQHQGKSFFGDSGVFLERFVENARHVEIQMMGDGYGKAIALGERDCSLQRRNQKVVEETPAPNLSDSTRARMRKASENLGSLLKYKCAGTVEFIYDEKRDEFYFLEVNARLQVEHPITEAVTGLDLVEWMLRIAADQPMDFNSSHINVSGAAIEVRLYAENPVKDFRPSPGQLTEVKFPKWARVDTWVTKGTRVSAEYDPTLAKIIVHGTDRNDAILKMNRALNETAVYGCVTNLDYLRSIVSSSMFKEAKVATKVLDSYDYKPYAFEILSPGAHTSIQDYPGRLGYWRIGVPPSGPMDSYSFRLANRIVGNNSKAPAIEVTLAGPKLKFHTEAIIAITGGKAPCLLNGSEISQNQAINVKTGDELAIGKLITGCRSYLAIRNGVDVPEYLGSRSTFTLGEIGGYNGRVLKLGDVLFLNKPELEATSLPGPEYAPESAPEELIPQISGDKEWTIGVTCGPHGSPDFFQEESAQQFFSETWKVHYNSNRFGIRLIGPKPKWARADGGEGGLHPSNAHDYVYSVGAINFTGDEPVIVTCDGPSLGGFVCEAVVAEAEMWKVGQVRPGDVIRFAPISYAVARELKESQDEAISTLSKTSLNVLTSNLELSTFENAILAEIPKRSDYSPKVTYRQAGDRYILVEYGENQLDFNVSYRINRLIDLVRRHETVGIAEMSQGVRSVLIEFDGYKISQKELLRTLMAYENEMHFDKNWSVKSKVIKLPMAFEDSKTLACVTRYQETIRSTAPWLPNNVDFIADVNGITREDVRNMLYSARFLVLGLGDVFLSSPCAVPLDPRQRFLGSKYNPSRTFTERGAVGIGGMYMCIYAAASPGGYQLVGRTIPIWDKLSIYPNAKDPWMLSPFDQIEFYPVSEEELEKLTEDCENGQFAVDIEDGVFDHRDYLEWVQENAESIEEFQKKQLGEKSAEFAQLIQVSNSELEQSQPSKPEVQESYPEDAELVYSEYSGRFWKPVVKEGDFVKKDQGLIVVEAMKTEMTVVAPQDGKVYKILHKNGDFVDAGDVVAVLQ

SEQ ID NO: 254 - protein, 1829 aa, Kluyveromyces_lactis
MESTLGWSVQDWLSFHSKSTPTKSLELLENLLKSQKPAPEDPAWISLIPVEDLHHQWNILQSKSNKEELPLYGVPIAVKDNIDYKGLPTTAACPSYLYQPTRDSYVVELLRDAGAVVIGKTNLDQFATGLVGTRSPYGKTPCVFNDKYVSGGSSAGSASVVGRGIVPLSLGTDTAGSGRVPAALNNLIGLKPTKGAFSCRGVVPACKSLDCVSVFALNLSDAEIAFKVMNKPDLLEDEYSREFPKNPISQYPKDLTIAIPKEVPWFGETENPKLYTKAVASLKNTGAKIVVVDFEPLLELARCLYEGAWVAERYCATRDFLATNPPESSLDETVVNIIKGAVKFDAADAFKFEYKRQGILQKVNLLLKDIDVLCVPTCPLNPKLEEVAQEPVLVNSRQGTWTNFVNLADLAALAVPSGFRSDGLPNGITLIGKKFSDYALLDLAKRFFSVAFPNNSRTYGKFVDRRITVEDELDGPSKDTLNGVKLAVVGAHLKGLPLHWQLQKCNATYLSSPKTSNNYKLYALPKVGPVLKPGLRRVNDGTGSQIQLEVYSVPYDRFGDFIAMVPEPLGIGSVELESGEWVKSFICEEFGYTQQGTVDITKFGGFKPYIEHIQVTEAQKKKPFETVLIANRGEIAVRIMKTLKRMGIKSVAVYSDPDKYSQHVTDADFSVALHGRTAAETYLDIDKIINAAKKTGAQAIIPGYGFLSENADFSDRCSQENIVFVGPSGDAIRKLGLKHSAREIAERAKVPLVPGSGLIKDAKEAKEVAKKLEYPVMVKSTAGGGGIGLQKVDSEDDIERVFETVQHQGKSYFGDAGVFMERFVNNARHVEIQMMGDGFGKAIAIGERDCSLQRRNQKVIEETPAPNLPEATRAKMRAASERLGSLLKYKCAGTVEFIYDEQRDEFYFLEVNARLQVEHPITEMVTGLDLVEWMLRIAANDSPDFDNTKIEVSGASIEARLYAENPVKDFRPSPGQLTSVSFPSWARVDTWVKKGTNVSAEYDPTLAKIIVHGKDRNDAIMKLNQALNETAVYGCITNIDYLRSIASSKMFKEAKVATKVLDSFDYKPCAFEVLAPGANTSVQDYPGRTGYWRIGVPPSGPMDSYSFRLANRVVGNNSKSPALEITLNGPKLLFHTETVIAVSGGTVSCTLNDAQIAQNEPIEVKRGDILSVGKVTVGCRAYLSIRGGIDVPEYLGSRSTFAMGNMGGYNGRILKLGDVLFLNQPELSVSSLPAPDFEPQAAPKSLLPTLSTNKDWKIGVTCGPHGSIDLFKEEYIEQFFNDKWKVHYNSNRFGVRLIGPKPKWARSDGGEAGLHPSNAHDYVYSLGAINFTGDEPVIITCDGPSLGGFVCQAVVAEAELWKVGQLTPGDTIQFVPLSYGVARQLKESQDKSIDNFEEGSLLELSDDKILPKYENPILAVLPKKSDLSPKVTYRQAGDRYILVEYGELEFDLNICYRINRLIHQVERHQTVGIVEMSQGVRSVLIEFDGSKINQKALLKCLIAYESEIQFDKNWNVKSKIFKLPMAFEDSKTLDCVTRYRETIRSEAPWLPNNVDFIADVNDIDRNDVKNMLYSAKFMVLGLGDVFLGSPCAVPLDPRHRYLGTKYNPSRTYTARGVVGIGGMYMCIYNAEGSPGGYQLVGRTITAWDKLVIGDHPIDHPWLLTPFDQVEFYPVTEEELEVIIEDNDNGKFKIDVEESIFDHKEYLAWINENIDSIVAFQEAQGGEKADEFARLIQVANAELKKSGDDKPQDVEEYPDDAELLYSEYTGRFWKPVAAVGDHVEAGDGVIIIEAMKTEMVVGATKSGKVYKILHKNGDMVEAGDLVAVIV

SEQ ID NO: 255 - protein, 1829 aa, Lachancea_thermotolerans
MTTVDTLGWSVQDWLAFHAKTTPEASLAALSALLSAQKCAPQDPAWISLVSPEHLEHQWRMLQSKGDKKNLPLYGVPVAVKDNIDAAGCNTTAACPAFSYTPERDASTVALLRAAGAIVIGKTNLDQFATGLVGTRSPYGKTPCVFSDKHVSGGSSAGSASVVARGIVPLALGTDTAGSGRVPAALNNLIGLKPTKGVFSCAGVVPACKSLDCVSIFALNLGDAERCFKVLAQYDPDHDEYSRTMPANPLQKFAKNVTIAIPKELPWYDEKENFKHYAAAVKNLEKTGAKVVELDFEPLLELARCLYEGAWVAERYEATRDFFATNPPESSLDPTVTKIIKGGANYSAADAFKFEYKRQGILQRVNKVLESIDVLCVPTCPHNPTFEQLEAMPVEMNSRQGTWTNFVNLADMAALAVPCGFRSDKLPTGITLIGKKFTDYALLDLANRYFKVAFPNSSRTYGKFLSTPITTQDEIEGPSFSSSDSIKLAVVGAHLKGLPLHWQLEKVNAQYLGSPKTSPNYRLYALPKNGPVLKPGLRRIGSDGGAQIQLEVYSVPKDQFGTFISMVPEPLGIGSVELENGEWVKSFICEEFGYVQKGTVDITELGSFKVYVEKLAKEESEKKKPFETVLVANRGEIAVRIMKTLKKLNIKSVAVYSDPDKYSQHVTDADISVPLNGRTAAETYLDIEKIIAAAKETKAEAIIPGYGFLSENADFSDRCAAEGINFVGPTGDAIRKLGLKHSAREIAEEAGVPLVPGSDLVKTPQEAREIAKKLEYPVMVKSTAGGGGIGLQKVDSEEDIERVFETVQHQGLAYFGDSGVFLERFVENARHVEIQLMGDGNGKAIAIGERDCSLQRRNQKVIEETPAPNLSEKTRMRMRKASESLGSLLNYRCAGTVEFIYDEKRDEFYFLEVNARLQVEHPITEMVTGLDLVEWMILIAAGNPPDFDVEIPAFGASIEARLYAENPVKDFRPSPGQLTNVHFPKWARVDTWVSKGTTVSAEYDPTLAKIIVHGTDRADAIAKLNKALNETSIYGCITNIDYLRSIASSEMFKTAKVATKVLDSFDYKPSAFEITAPGAYTTVQDYPGRVRHWRIGVPPSGPMDTYSFRLANRIVGNHYKAPAIEITLNGPKVLFHTEATIAITGGTVPCTVNGESVQQNKPIMVKKGDQLSVGKFTSGCRAYLAIRGGIDVPEYLGSRSTFALGNMGGYNGRVLKLGDVLFLNQPELASSAIPAPIFSPSEPDASLLPAIPDSKEWRIGVTCGPHGSPDFFKPESVEEFFGDKWKVHYNSNRFGVRLIGPKPKWARKDGGEGGLHPSNAHDYVYSLGAINFTGDEPVIITADGPSLGGFVCQAVVPEAELWKVGQVKPGDFIQFVPVSYQSARLLKESQDHAIESFEKGALKNLTSELVLPTAQNPILAQLPKSSEYCPKVTYRQAGDRYILVEYGENEMDLNISYRVNRLISLVEENKTVGIVEMSQGVRSVLVEFNGYKITQSSLLKTLVAYEQEIKFDKNWTIKSKVFKLPLAFEDSETLNCVKRYQETIRSKAPWLPNNVDFIANVNGIKHSDVEQMLYHARFMVLGLGDVFLGAPCAVPLDPTHRFLGSKYNPSRTYTKNGTVGIGGMYMCIYAMDSPGGYQLVGRTIPIWDKLQLGAHSGDHPWLLTPFDQVEYYQVTEEELNKFTEEFENGQFKVQIEETVFDHHQYSAWIEANSGAIEEFQKKQKGEKAEEFAKLIREADAELAKAPAASSSVDEEFPEDAEMVYSEYSGRFWKPMVSAGDTVKAGDGLIIVEAMKTEMIVPAPKGGKVLKVVHNNGDMVEAGDVVAVIQ

SEQ ID NO: 256 - protein, 1834 aa, Candida_glabrata
MTATNICPSIGWSIQDWIDFHFKSTPKDSYESLLELVKNQRIAPEDPAWISVATESLLEQQWQLLQSRHEKEKLPLYGVPIAVKDNIDAKGFPTTAACPSFSYMPTRDSTVVELLKQAGAIIIGKTNLDQFATGLVGTRSPYGRTPCVFSDKHVSGGSSAGSASVVARGIVPIALGTDTAGSGRVPAALNNIIGLKPTRGIFSCSGVVPACKSLDCVSVFSMNLSDAEKCLKIMTKLDIENDEYSRSFPANPLQSFNKNLTVAIPKNVMWYGEKENPLLYDRAIDNFKQLGAQIKIIDFEPLLELARCLYEGTWVAERYAATRKFLETSPQQSTLDPVVYGIIKSATKFDAADAFEYEYKRQGILRKVEVLLQDIDVLCVPTCPLNPSFEEVDKEPILVNSRQGTWTNFVNLADLSALAIPVGFRSDGLPNGVTLIAKKFEDYALLQLAKRFLAQLYPSGTRPYGMFLDRYVGLKDDSLEGPIVSSDDSIVLAVVGAHLRGLPLHWQLEKVNATFICSTKTAKKYELYALPKNGPVLKPGLRRITSGTGSQIELELYSVPKEKFGEFISFVPEPLGIGSVELENGKWVKSFICEESGYNSTGSIDISHYGGFRAYIESIIPSNESKKGHFKTVLVANRGEIAVRIIKTLKSMQIKSLAIYSATDKYSQHVLDVDMAQALDGHTVEETYLHVEKIISIAKKYDVDAIIPGYGFLSENASFADRCEQEGIQFIGPRGETIRKLGLKHSAREVAKSAGVPLVPGSPLVKNADEAFTIAKNIGYPVMVKSTAGGGGIGLQKVDNEQDMRKAFETVKHQGSSYFGDSGVFMEKFIDNARHVEVQIMGDGKGKTLALGERDCSLQRRNQKVIEETPAPNLPRETRQKMLTAAERLGAYLNYRGAGTVEFIYDEQRDQFYFLEVNTRLQVEHPITEMVTGLDLVEWMIKISAGVMPSLDEFNISQNGASIEVRVYAENPLKDFRPSPGELVDVQFPNDCRVDTWVKKGTKISPEFDPTLAKIIVHGKDRNEAILKMKKALNETKIYGCVTNVDYLKSLISSEMFRNAQLSTNYLNTYEYSPSAVEIIEPGALTTIQDYPGRVNYWRIGVPPCGPMDNYSFRLANRIVGNDERTPGIEITLTGPTIKFYSDSLVSIAGGEVCCKLDEKKIPMFEPISVKTGSVLSIGKIVKGSRAYLAIRGGIDVPKYMGSFSTFTMGNLGGFNGRALKRGDVLSLPQQFDSEHGIPSPCFSPEKAPIYVRPDIPNDGVWTIGVLAGPHGAPDIFESEGMMEFFKSEWKVHYNSNRFGVRLIGPKPKWSRTDGGEGGLHPSNTHDYVYSLGAINFTGDEPVIITCDGPSLGGFVCQAVVSEAEMWKVGQLKPGDTINFTPIDWQSARNLKENQDVIINDMSSCALQKLSDQPLLKSPEDPILFQKDGQELQSPKVVYRQAGDRYILIEYGDDIFELNLCYRIKSLIDIISQRNTKGIKEMSQGVRSVLVEYDGYEISQKELLKTLIAYEEQLPQEKNWSVKSRIFRLPMAFEDKETLACVKRYQETIRSKAPWLPNNVDFVAEVNNLTHDDIRQLIYTTRYMVLGVGDVFLGSPCAIPLDPRNRLLGSKYNPSRTFTKRGVVGIGGSYMCIYAADSPGGYQLVGRTIPIWDRLMLQSKKDEPWLLSPFDQIEFYPVSEEQIDEYTDEWDNGNYKIDVDDVVFDHGSYLKWVQDNIEAIEEHQRAQRGDNYSKFAQKIQEANADLKQTTTEVIEQNILEDDCEYIFSEYAGRFWKPIVEIGASIEKDQGVAVIEAMKTEMIVSSSVVGKLKKFLFKNGDMVDAGDPVAIIQCL

SEQ ID NO: 257 - protein, 1832 aa, Komagataella_pastoris
MAVIDTTGWTTSQWIKYHSEHDPEESFQLLSALVSSQKTAPEDPVWISLVSEDDLLHQWKILQSKSDKFQLPLYGVPIAVKDNIDVKGLPTTGACPSFKYSPQSDATIVSLLRDQGAIVIGKTNMDQFATGLVGTRSPYGKPTSAFSDKHVSGGSSSGSAVVVAKGIVPISLGTDTAGSGRVPAHINNLIGLKPTKGVFSCHGIVPACKSLDCPSIFSLTLSDAQLAFNIMAQPDLAQDEYSRPMPSNPKKYFSSALKIAIPQDIPWFGDSENKKIYTAAVESASKLGAEVVALDFSPLLDLAKCLYEGPWVSERWESMKDFYSTNPDNKDLDPTVTSIIKGGEKFDAATTFRFEYKRNAILQKVKASFSDFDALLVPTAPLNPTLEEVEKEPVLVNSRQGVWTNFVNLADMSALAVPAGFRSDGLPCGVTFLSAKFNDYALLDLANRFFKVHYHEGVRRLGATNAENGIGDELLPLPKPNLDDCVKLAVVGAHLKGFPLHWQLIKCNATYLASPKTAKSYRLYALPLKGGPIAKPGLRRVDADIGEQIQLEVYAIPKEHFGTFISLVPEPLGIGSVELESGEWVKSFICEEIGYKAKGTEDITSFGGWKNYQDSLKKHAESQKKPFDVVLVANRGEIAVRIIKTLKKLKIKSVSVYSDPDKYAEHVLISDESVALNGVSAAETYLDVEKIVKACKDTGAQAVVPGYGFLSENADFSDRLGKEGIVFVGPSGDAIRRLGLKHSAREIAEKAGVPLVPGSGLVTSTKEAKEIAAKLEYPVMVKSTAGGGGIGLQKVDSEADIERVFETVQHQGKSYFGDSGVFLERFVENARHVEIQMFGDGYGKAIALGERDCSLQRRNQKIIEETPAPNLPEATRLKMRKAAEQLGSAMNYKCAGTVEFIYDEKRDAFYFLEVNARLQVEHPITEMVTGLDLVEWMLYIAADMPPSFDQEIKVTGASMEARLYAENPIKDFMPSPGQLTEVEFPKWARIDGWVKKGTVVSAEYDPTLAKIIVHGKDRQDALKKLRQALNETVVHGCITNIDYLRSIANSQMFETAKVATKVLDSYDYVPKALEILAPGAYTTVQDYPGRVGYWRIGVPPSGPMDDYNFRLSNKIVGNAKAAPAIEITLNGPTILFHHDAVIGVTGGNVDVTVNGTSVSMYEPVKLSKGDKLAIGKLTTGCRAYLAIRGGIDVTEYLGSRATFALGNLGGYNGRVLKFGDVLFLGQPELPACSLPYPESEPQAVPKALIPQLPAKEWVIGVTCGPHGSPDFFQQDTVEEFFKEQWKVHYNSNRFGVRLIGPKPQWARPDGGSAGLHPSNTHDYVYSLGAINFTGDEPVILTCDGPSLGGFVCQAVVAQAEMWKIGQVKPGDLIKFVPITCETAVSIKASQDASCDDLSGKLVEISSVKQLDGPINPVLYTIKPDKETGLSATYRQAGDRYILVEYGDNNMDLNMSYRVHTLISMVEKHKTVGIVEMSRGVRSVLVEYDGTAISQKELVEILLRYEREIRFVNKWKVPSRVIKLPMAFEDKKTLDAVTRYQETIRSTAPWLPNNVDFIANVNNIQRSEVKDMLYSARFLVLGLGDVFLGAPCAVPLDPRQRFLGTKYNPSRTFTPNGTVGIGGMYMCIYTMESPGGYQLVGRTIPIWDKLVLGQHSKKFNDGNPWLLSPFDQVEFYPVSEEEVDKFTEEANCGQFDVDIVDSVFDHTKYLEWIQANQESIQAFHDKQGGEQLAEFNRLIQIANEELKNSSSVQEVKADEFSEDAELVYSEYSGRFWKPLVQTGDVVTEGQGLVVVEAMKTEMVVNSPRAGKVVKIVHTNGDMVDAGDLVVVIE

SEQ ID NO: 258 - protein, 1822 aa, Scheffersomyces_stipitis4
MSYIGWSVQDWIQFHYQSTPNESFALLQELLGDQNKAPEDPAWISLATLDNLKHQWHFLQSKSNKLDLPLYGVPVAIKDNIDVKGFETTAACPSFAYSPEDDATTVKLLRNAGAIVIGKTNLDQFATGLVGTRSPYGITPNTFNKDYVSGGSSAGSASVVARGIVPISLGTDTAGSGRVPAALNNIIGLKPTKGVFSCAGVVPACKSLDCVSIFSLNLQDAQLVFNIMAQEDALNDEYSRPLPANPLIKFPATPKIAVPTNLLWFDETENPKIYNKAVDHFKENVGAELVPLNIDLLLDLAKCLYEGPWVSERFAATKDFFATNPPAADLDPTVTQIIKGGEKHSAATAFEYEYKRQGIIQKVSKLLEGIDAIIVPTAPLNPTIAEVTKEPIKVNANQGTYTNFVNLADMSALAIPAGFRSDGLPFGITLLSHKFNDYALLDLASRYLKGVDSTEKRFYGCLKDKPVSSLGDELLPNIPGFDPESQIKLAVVGAHLKGFQLHWQLEKVRANLIESTTTSGNYKLYALPKTGPVAKPGLRRVTENGTKIALEVYAVPKETFGDFIAMVPEPLGIGSVELTSGEWVKSFICEEVGYNAPGTTDVSSFGGWKNYHEHLAQEAKAQKKPFKSVLVANRGEIAVRIIKTLKRLNIKSIAVYSDPDKYAKHVLIADAAVPLHGTSAAETYIAVEKIIQAAKDTGAEAIIPGYGFLSENADFSDRCGKEGIVFVGPSGDAIRKLGLKHSAREIAEKAGVPLVPGSGLVKDALEAKEIAAKLEYPVMVKSTAGGGGIGLQKVDSEKDIERVFETVQHQGKSYFGDAGVFLERFVEDARHVEVQMFGDGKGRAIALGERDCSLQRRNQKVIEETPAPNLPEATRQKMRDAAESLGASMNYKCAGTVEFIYDEKRDEFYFLEVNARLQVEHPITEMVTGLDLVEWMLYIAADDPPDFSQKIEVTGASMEARLYAENPVKDFMPSPGQLTEVKFPEWARVDGWVEKGTVISAEYDPTLAKIIVHGKDRNDALKKLRQALDETVVFGCITNIDYLRSIINSSMFAEAKVATKVLDSYDYRPTAFEIISPGAYTTVQDYPGRKGYWHIGVPPSGCMDEYSFRVANRIVGNDKVAPGIEITLNGPKLLFHHDAVIAVTGGAVEIDINGYKVEQWAPLHVKRGDKVSIGKLTTGCRAYLAIRGGIDVTEYLGSRSTFALGNLGGYNGRVLKLGDVLFLGQPEISSCTLPAPISEPSNIAPSLIPNYDNKVWQVGVTCGPHGSPDFFKPEAIETFFKDTWKVHYNSNRFGVRLIGPKPVWARPDGGDAGLHPSNTHDYVYSLGAINFTGDEPVILTCDGPSLGGFVCAAVVVESEMWKIGQVKPGEQIQFIPISYETSIELKNQQDKIIENLTGDLPSFDGKAIKPENPVLFEFSASSNAPKVVYRQAGDRYILVEYGENCMDLNTSYRIQRLIEMVEEHKTRGIVEMSQGVRSVLIEFNREVTQDELLKTLISYEKEIFFINKWEVKSRIIKLPMAFEDKKTLDAVKRYSETIRSEAPWLPNNVDFIANINGITREEVRDLAYTARFMVLGLGDVFLGAPCAVPLDPRQRLLGTKYNPSRTYTPNGTVGIGGSYMCIYTMESPGGYQLIGRTVPIWDKLTLASHSGDKPWLLRPFDQVEFYPVSEEEIDKFSEEMNAGKFKVDIIETVFKHGKYLEWIQEHSDSIAEFQKNQGGEKLEEFNRLIQISNSELEKSGTKIVEDESYDDTHELVYSEYSGRFWKSLVETGDEVKAGRALIVVEAMKTEMVVSAPRDGKVVKIYHKNGDMVDAGDLVVVLA

SEQ ID NO: 259 - protein, 835 aa, Schizosaccharomyces_pombe
MQPRELHKLTLHQLGSLAQKRLCRGVKLNKLEATSLIASQIQEYVRDGNHSVADLMSLGKDMLGKRHVQPNVVHLLHEIMIEATFPDGTYLITIHDPICTTDGNLEHALYGSFLPTPSQELFPLEEEKLYAPENSPGFVEVLEGEIELLPNLPRTPIEVRNMGDRPIQVGSHYHFIETNEKLCFDRSKAYGKRLDIPSGTAIRFEPGVMKIVNLIPIGGAKLIQGGNSLSKGVFDDSRTREIVDNLMKQGFMHQPESPLNMPLQSARPFVVPRKLYAVMYGPTTNDKIRLGDTNLIVRVEKDFTEYGNESVFGGGKVIRDGTGQSSSKSMDECLDTVITNAVIIDHTGIYKADIGIKNGYIVGIGKAGNPDTMDNIGENMVIGSSTDVISAENKIVTYGGMDSHVHFICPQQIEEALASGITTMYGGGTGPSTGTNATTCTPNKDLIRSMLRSTDSYPMNIGLTGKGNDSGSSSLKEQIEAGCSGLKLHEDWGSTPAAIDSCLSVCDEYDVQCLIHTDTLNESSFVEGTFKAFKNRTIHTYHVEGAGGGHAPDIISLVQNPNILPSSTNPTRPFTTNTLDEELDMLMVCHHLSRNVPEDVAFAESRIRAETIAAEDILQDLGAISMISSDSQAMGRCGEVISRTWKTAHKNKLQRGALPEDEGSGVDNFRVKRYVSKYTINPAITHGISHIVGSVEIGKFADLVLWDFADFGARPSMVLKGGMIALASMGDPNGSIPTVSPLMSWQMFGAHDPERSIAFVSKASITSGVIESYGLHKRVEAVKSTRNIGKKDMVYNSYMPKMTVDPEAYTVTADGKVMECEPVDKLPLSQSYFIF

SEQ ID NO: 260 - protein, 835 aa, Glomerella_graminicola
MHLVPKELDKLVISQLGSIAQRRLARGVKLNHSEATALIASNLQELIRDGNHTVADLMSLGATMLGRRHVLPSVCSTLHEIQVEGTFPSGTYLVTVHNPIATDDGDLARALYGSFLPVPSNDLFPMPEIAAYEPKRAPGAVITAVHKVKLNAARKRIRLRVKSKGDRPVQVGSHYHFIETNPQLEFDREKSYGYRLDIPAGTSVRFEPGDVKTVTLVEIGGNKVIRGGNRLASGGVELWRATEIVEKLQLAGFAHAPEPEAIMDFAEAYHMERAAYATMFGPTIDDLVRLGSTDLWIKVEKDFTVYGDECKFGGGKTLREGMGQATGRPDAESLDMVVTNALVVDWTGIYKADIGVKNGMIVGIGKAGNPDVMDGVTPNMIVGSCTDVVAGEGKIVTAGGVDTHIHFICPQQANEAVASGITTMLGGGTGPSAGTSATTCTPGKNYMREMLQACDSLPLNIGITGKGNDSAPEALREQVLAGACGLKLHEDWGTTPAAIDSCLTVCDELDVQCLIHTDTLNESGFVESTINAFAGRTIHTYHTEGAGGGHAPDIISVVEHPNVLPSSTNPTRPYTRNTLDEHLDMLMVCHHLSKNIPEDVAFAESRIRAETIAAEDVLHDLGAISMMSSDSQAMGRCGEVILRTWNTAHKNKVQRGFLAEDEGTGADNFRVKRYVSKYTINPAVAQGFSHLVGSIEVGKLADLVVWDPAWFGTKPNLVIKSGLIASAQMGDPNASIPTVQPVIARPMFAPLVPASSVLFVSEGSISSGAIASYGLRKRVEGVKGCRTVGKKDMRFNDSMPKMRVDPESYVVEADGVVCEAAPAETLPLTQAFYVY

SEQ ID NO: 261 - protein, 842 aa, Neurospora_crassa
MHLIPKELDKLAISQLGFLAQRRLARGIKLNHSEATALIANNLQELIRDGNHTVADLMALGATMLGRRHVLPEVTSTLHEIQVEGTFPSGTYLVTVHNPISSDDGDLARALYGSFLPIPPNDDSVFPLPPAAAYEASKQPGAVVCVKEAKVKLNEGRKRIRLRVTSKGDRPIQVGSHYHFIETNPQLEFDRARAYGYRLDIPAGTSVRFEPGDTKTVTLVEIGGNKVIRGGNNLASGKLDLTRAEEIIAKLQKAGFAHAPEEPVGDAAAFISEPFTMDRRAYAVMFGPTVGDMVRLGATDLWIKVEKDYTVYGDECKFGGGKTLREGMGQATGRSDEETLDMVVTNALVVDWTGIYKADIGVKAGVIVGIGKAGNPDVMDGVTPGMIVGSCTDVVAGEGKIITAGGIDTHIHFICPQQAAEALAAGITTFLGGGTGPSAGTNATTCTPGAHYMRQMLQACDSLPLNIGITGKGNDSSPSALREQILAGACGLKLHEDWGTTPAAIDSCLTVCDELDVQCLIHTDTLNESGFVESTIAAFAGRTIHTYHTEGAGGGHAPDIISVVEHPNVLPSSTNPTRPFTRNTLDEHLDMLMVCHHLSKNIPEDVAFAESRIRAETIAAEDVLHDLGAISMMSSDSQAMGRCGEVILRTWNTAHKNKLQRGPLPEDQGTGGADNHRVKRYISKYTINPALAQGMSHLIGSIEPGKLADLVVWDPAWFGTKPSLVIKSGLIASAMMGDPNASIPTVQPVIARPMFAPMVAKSKVLFVSQASLDSGAIEGYGLKSRVEAVKGCRTVGKKDMKFNERMPRMKVDPERYTVEADGEVCTAEPSSELPLTQSYFVY

SEQ ID NO: 262 - protein, 836 aa, Arthroderma_otae
MRLIPRELDKLTISQLGFLAQRRLARGVRLNHAEATALISSNLQELIRDGNHTVADLMAIGKTMLGRRHVLPSVVASLTQLQVEGTFICGTYLVTVHNPICSDDGDLEKALYGSFLPVPPDDLFPDPEPEEYLPERMPGAVVVVKEKKIVLSAGRKRIKLRVTSKGDRPIQVGSHYHFIETNPQLEFDRAQAYGFRLDIPAGSSHRFEPGESKTVQLVEIGGHKVIKGGNFLATGKVDSGRRERILHRITEAGFLHIPEPTVDASLVTPFSMTREAYARMFGPTTGDLIKLAATDLWVRVEKDLTTYGDECTFGGGKSLREGMGQATGRRADEVLDSCITNAVILDWTGIYKADIGIKNGIIVGIGKAGNPDVMDGITPGMIIGSATDIVAGERMFVTAGGIDTHIHFICPQQVDEALASGITTMLGGGTGPSEGTNATTCTPSPNAIRQMIQSSDNFPMNFAFTGKGNDSEQRGLRDQVRAGAAGLKIHEDWGSTPAAIDSCLSVCDELDVQCLIHTDTLNESGFVEQTIKAFKDRVIHTYHTEGAGGGHAPDIISVCEHPNVLPSSTNPSRPYTLNTLDEHLDMVMVCHHLSKHIPEDVAFAESRIRAETIAAEDVLHDMGAISMMSSDSQAMGRCGEVILRTWHTAHKNKLQRGRLPEDEGTDCDNFRAKRYVSKYTINPAIAQGMSHLIGSVEVGKVADLVLWKFASFGVKPNLVLKSGMIANAQMGDANGSIPTIEPIMSRPMWGAFVPNTSIIFVSQSSVDEGVIDTYDLKKRVEPVKNCRNIGKANMKFNDTMPKMRVDPESYTVEADGMICDADPIQNLPLCQDYFIY

SEQ ID NO: 263 - protein, 838 aa, Aspergillus_fumigatus
MHLIPKELDKLVISQLGFLAQRRLARGVRLNHAEAAALISSNLQELIRDGHYSVADLMSIGKTMLGRRHVLPSVVHTLVELQVEGTFPTGTYLVTVHHPISSDDGDLEKALYGSFLPIPPADTFPDPNPDDYLPEKMPGAVLPVKNERITLNDGRKRIPLKVMSKGDRPIQVGSHYHFIETNPQLHFDRLRAYGYRLDIPAGTSVRFEPGDTKTVTLVEIAGNRIIKGGNSIASGKVDISRAEEILQRLQVEGFAHVPEPAPTADSALIAPFTMDREAYARMFGPTTGDLVRLGLTNLWVRVEKDCTVYGDECAFGGGKTLREGMGQSSERSATECLDTVITNALIIDWSGIYKADIGIKNGLISAIGKAGNPDMMDGVHPDMIVGSSTDVIAGENKIVTAGGFDTHIHFICPQQVDEALASGITTFLGGGTGPSTGTNATTCTPGPTLMRQMIQACDGLPINVGITGKGNDSGGKSIEEQIRAGAAGLKLHEDWGSTPAAIDTCLDMCDKFDVQCMIHTDTLNESGFVEQTVKSFKNRTIHTYHTEGAGGGHAPDIISVVEHPNVLPSSTNPTRPFTMNTLDEHLDMLMVCHHLSKNIPEDVAFAESRIRAETIAAEDVLHDLGAISMMSSDSQAMGRCGEVILRTWNTAHKNKAQRGPLKEDEGTGADNFRVKRYISKYTINPAIAQGMSHLIGSVEVGKLADLVIWHPSTFGTKPAQVLKSGMIVASQMGDPNGSIPTIEPVVMRRQFGAFVPSTSIMWVSQASIDDGIVQSYGLKKRIEAVRNCRNIGKKDMKFNDVMPKMRVDPESYVVEADGVLCDAEPAEALPLTQDYFVY

SEQ ID NO: 264 - protein, 835 aa, Trichoderma_reesei
MHLVPKELDKLVISQVGFLAQKRLARGVRLNHSEATALIANNLQELIRDGNHTVADLMDLGSTMLGRRHVQPSVCATLTEIQVEGTFPTGTYLVTVHNPIRTDDGDLARALYGSFLPVPDADLFPLAAPEEYEATAQPGVVVAAKGKIALNQSRKRIRLRVTSKGDRPIQVGSHYHFIETNPQLDFDRERAYGFRLDIPAGTSVRFEPGDTKTVTLVEIGGNRVIRGGNHMATGGLELWRVKDIVEKLQQAGFSHTPEPQADAALIDAFQIDRAAYATMFGPTTGDLVRLGNTSLWVKVEKDYTVYGDECKFGGGKTLREGMGQATGRLDADSLDMVVTNALVIDWTGIYKADIGVKDGHIVGIGKAGNPDVMDGVSPGMVVGSCTDVIAGEGKIVTAGGIDTHIHFICPQQANESLASGITTLLGGGVGPSAGTNATTCTPGKNYMRQMLQACDELPVNVGITGKGNDSSPVALREQVAAGACGLKLHEDWGSTPAAIDSCLQVCDELDVQCLIHTDTLNESGFVESTIESFKGRTIHTYHTEGAGGGHAPDIISVVEHPYVLPSSTNPTRPFTNNTLDEHLDMLMVCHHLSRDIPEDVAFAESRIRDKTIAAEDVLHDLGAISMMSSDSQAMGRCGEVILRTWNTADKNKAQRGTLDEDAGTGADNFRVKRYISKYTINPALAQGFAHLVGSVEVGKLADLVVWDPAWFGTKPSLVIKSGLIALAQMGDPNASIPTVQPIIARPMFAPLVPQTSVLFVSGASVASGAVQSYGLRKRVEAVKGCRSVSKRDMRFNDAMPRMKVDPESYVVEADGKVCAAEPATRLPLTQAWYMY

SEQ ID NO: 265 - protein, 836 aa, Penicillium_marneffei
MQLIPKEIDKLVISQLGLLAQRRLARGVRLNHAEATALISSNLQELIRDGNHTVADLMSIGKTMLGRRHVLPSVISSLVELQVEGTFRTGTYLVTVHHPISTDDGDLEKALYGSFLPVPPSSVFPDPDPADYEPENQPGAVITVKNSRITLSEGRKRIKLKVMSKGDRPIQVGSHYHFIETNPQLHFDRERAYGYRLDIAAGTSIRFEPGDTKTVTLVEIGGNKIISGGNFLASGKVDISRVEAILTKLQQAGFAHEPEPTADASLIAPFSMEREAYVRMFGPTTGDLVRLGATNLWVKVEKDLTHYGDECTFGGGKSLREGMGQSSGKIAKECVDTVVTNALIIDWSGIYKADIGIKDGIIVGIGKAGNPDVMDGVHPDLVVGSSTDVIAAEGKIVTAGGFDTHIHFICPQQINEAISSGITTMLGGGTGPSTGSNATTCTPGPTHMRQMIQACDSLPVNVGITGKGNDSGVESLREQAIAGAAGMKLHEDWGSTPAAIDTCLEVCDEFDIQCMIHTDTLNESGFVEQTIQSFKNRTIHTYHTEGAGGGHAPDIISVVEHPNVLPSSTNPTRPFTLNTLDEHLDMLMVCHHLSKNIPEDVAFAESRIRGETIAAEDVLHDLGAISMMSSDSQAMGRCGEVILRTWNTAHKNKEQRGVLPEDEGTGADNFRVKRYISKYTINPAIAQGMVHLIGSVEVGKLADLVLWTPDNFGTKPKLVVKGGMIAVAQMGDPNASIPTVEPVIMRPQFGTFVPSTSIMFVSQASISQGVVQSYNLRKRIEPVRNCRNIGKKDMKFNDVMPKMKVDPERYTVEADGQLCTAEPATKLPLTQQYFVY

SEQ ID NO: 266 - protein, 837 aa, Uncinocarpus_reesii
MQLIPREIDKLTISNLGFLAQRRLARGVRLNHAEATALIASNLQELIRDGNHSVADLMSIGKEMLGRRHVLPGVVATLSQIQVEGTFPTGTNLVTVVNPVSSDDGNLEKALYGSFLPVPPMDAFPDPNPDDYQPEKMPGALIPVKTNKKIELNAGRNRIMLKVTSRGDRPVQVGSHYHFIEVNPQLDFDRAKAYGYRLDIPAGTSIRFEPGATKSVPLVEIGGIRFIRGGNAMASGLLDYRRVDEILMKLQKAGFAYTPEPKAGPQLIEPCSMTREAYARMFGPTTGDLVRLGSTNLWVKVEKDLTRYGDESSFGGGKSIRDGMGQATGRHSADTLDAVVTNALVIDWTGIYKADIGIKDGLICGVGQAGNPDVMDGVTPNMIIGSTTDVISGEAKIVTAGGIDTHVHFICPQQVEEALASGVTTMLGGGTGPTEGSNATTCTPAPNHFKRMMQACDRLPMNIALTGKGNDSGLPSLRDQCRAGAAGLKVHEDWGATPAAIDTCLKVCDEYDIQCLIHTDTLNESGFVEQTIKAINGRVLHTYHTEGAGGGHAPDIISVVEHPNVLPSSTNPTRPFTTNTLDEHLDMVMVCHHLSKDIPEDVAFAESRIRSETIAAEDVLHDMGAISMLSSDSQAMGRCGEVVTRTWTTAHKNKLQRGPLKEDEGTGADNFRVKRYISKYTINPAIAQGMAHTIGSVEVGKTADLVLWKFANFGTKPSMILKSGMVAASHMGDPNGSIPTIEPIIMRPSYASLTPQASIMFVSEASIKLGIISSYNLQKRIESVKNCRNVSKRDMKYNDTMPKMRVDPESYVVEADGEVCTADPVSELPLTQECYVY

SEQ ID NO: 267 - protein, 836 aa, Paracoccidioides_brasiliensis
MQLIPREIDKLTISQLGFLAQRRLARGVRLNHAEATALIASNIQELIRDGNHTVADLMALGKTMLGRRHVLPSVTSTLHELFVEGTFPSGTYLVTVHEPISSEDGDLEKALYGSFLPVPSNDIFPDPDPEDYHPLKMPGAVIPVKQAKIVLNAGRKRLSLKVTSRGDRPIQVGSHYHFIEVNPQLDFDRIKAYGYRLDIPAGTSIRFEPGDSKTVTLVEIAGEKIIHGGNFLANGKVDLGRADEIIERLQRAGFAHTPQPAGDMTRIEPFSMNREAYEHMFGPTTGDLVRLGSMDLWVKVEKDMTSYGDECSFGGGKTLREGMGQASGRGADDVLDTVITSALIIDWSGIYVADIGIKGGDIVAIGKAGNPDIMDGVHPKMVVGACTDVISGEGKIVTAGGIDTHVHFICPQQVNESLASGITTMFGGGTGPSTGTNATTCTPAPNQIKQMIQACDHFPMNFGITGKGNDSGPKGLREQCRAGAAGLKLHEDWGCTPAAIDTCLDVCDEYDVQCLIHTDTLNESGFVEQTTKAFKNRTIHTYHTEGAGGGHAPDIISVVEHPNVLPSSTNPTRPFTMNTLDEHLDMLMVCHHLSKNIREDVAFAESRIRAETIAAEDVLHDLGAISMMSSDSQAMGRCGEVILRTWNTADKNKMQRGPLKEDEGTGADNFRVKRYVSKYTINPAIAQGMSHVIGSVEVGKVADLVLWTFANFGTKPSMVLKSGMIAAAMVGDPNASIPTIEPVVMRYMFGARVPQTSIMFVSQASKSLGIIDSYGIKKRVEAVRNCRDIGKKDMKYNDVMPKMKVDSERYTVEANGMLCEAEPASRLHLTQQYFVY

SEQ ID NO: 268 - protein, 838 aa, Neosartorya_fischeri
MHLIPKELDKLVISQLGFLAQRRLARGVRLNHAEAAALISSNLQELIRDGHYSVADLMSIGKTMLGRRHVLPSVVHTLVELQVEGTFPTGTYLVTVHHPISSDDGDLEKALYGSFLPIPPADTFPDPNPDDYLPEKMPGAVLPVKNERITLNDGRKRIRLKVMSKGDRPIQVGSHYHFIETNPQLHFDRLRAYGYRLDIPAGTSVRFEPGDTKTVTLVEIAGNRIIKGGNFIASGKVDISRAEEIMQRLQVEGFAHVPEPAPTADSALIAPFTMDREAYARMFGPTTGDLLRLGLTNLWVRVEKDCTVYGDECAFGGGKTLREGMGQSSERSEAECLDTVITNALIIDWSGIYKADIGIKNGLISAIGKAGNPDMMDGVHPDMIVGSSTDVIAGENKIVTAGGFDTHIHFICPQQVDEALASGITTFLGGGTGPSTGTNATTCTPGPTHMRQMIQACDTLPINVGITGKGNDCGGKSIEEQIRAGAAGLKLHEDWGSTPAAIDTCLDMCDKFDVQCMIHTDTLNESGFVEQTVKSFKNRTIHTYHTEGAGGGHAPDIISVVEHPNVLPSSTNPTRPFTMNTLDEHLDMLMVCHHLSKNIPEDVAFAESRIRAETIAAEDVLHDLGAISMMSSDSQAMGRCGEVILRTWNTAHKNKAQRGPLKEDEGTGADNFRVKRYISKYTINPAIAQGMSHLIGSVEVGKLADLVIWHPSTFGTKPAQILKSGMIVASQMGDPNGSIPTIEPVIMRRQFGAFVPSTSIMWVSQASIDDGIVQSYGLKKRIEAVRNCRNVGKKDMKFNDVMPKMRVDPESYVVEADGVLCEAEPAEALPLTQDYFVY

SEQ ID NO: 269 - protein, 837 aa, Coccidioides_posadasii
MQLVPREIDKLTISNLGFLAQRRLARGVRLNHAEATALIASNLQELIRDGNNSVADLMTIGKEMLGRRHVLPSVVATLKQVQVEGTFPTGTNLITVVNPVCSDDGDLEKALYGSFLPVPPKETFPDPDPDDYQPEKMPGAVIPLKTSKKIELNAGRNRIMLKVTSRGDRPIQVGSHYHFIEVNPQLDFDRAKAYGYRLDIPAGTSIRFEPGATKAIPLVEIGGKRIIRGGNHIAVGQVDFRRVDEIIMRLQKAGFAYTPEPKQDAHLIEPFSMTREAYARMFGPTTGDVVKLGTTDLWIKVEKDLTYYGDECSFGGGKTIRDGMGQATGRHSVDVLDTVLVNALIVDWTGIYKADIGLKDGLICGIGKAGNPDMMDGVTPNMIVGSSTDVIACEGKIVTAGGIDTHVHFICPQQVEEALASGVTTLLGGGTGPTEGSNATTCTPAPNQFKTMMQACDHLPINVGLTGKGNDSGLPSLRDQCRAGAAGLKVHEDWGATPAVIDTCLQVCDEFDIQCLIHTDTLNESGFVEQTINAFKNRVIHTYHTEGAGGGHAPDIISVVEKPNVLPSSTNPTRPYTVNTLDEHLDMVMVCHHLSKDIPEDVAFAESRIRSETIAAEDVLHDTGAISMLSSDSQAMGRCGEVVVRTWNTAHKNKMERGRLKEDEGTDSDNFRVKRYISKYTINPAIAQGMAHTIGSVEVGKTADLVLWKFANFGTKPSMVLKSGMAVSAQMGDPNGSIPTIEPIIMRPMYASLNPKASIMFVSQASIKLGIIDSYHLKKRIEPVKNCRNISKRDMKFNDIMPKMRVDPESYVVEADGEECTAEPVSELPLTQDYFVY

SEQ ID NO: 270 - protein, 856 aa, Trichophyton_verrucosum
MRLVPRELDKLTISQLGFLAQRRLARGVRLNHAEATALISSNLHELIRDGNHTVADLMAIGKTMLGRRHVLPSVVSSLTQLQVEGTFVCGSYLVTVHNPICSDDGDLEKALYGSFLPVPPKDLFPDPDPEEYLPERMPGAVVVVKDSRIELSPGRRRIKLRVTSKGDRPIQVGSHYHFIETNPQLEFDRAQAYGFRLDIPAGASHRFEPGESKTVQLVEIAGHKVIKGGNFLATGEVDHGRRDRILSRIAQAGFMHTPEPMADASLVKPYTMTREAYARTFGPTTGDLIKLAATDLWVKVEKDLTTYGDECTFGGGKSLREGMGQATGRHAHEVLDSCVTNAVILDWSGIYKADIGIKDGIIVGIGKAGNPDVMDGITPGMVIGSSTDIIAAERMIVTAGGIDTHVHFICPQQVDEALSSGITTMLGGGTGPSEGSNATTCTPSPNSIRQMIQSSDGFPMNFAFTGKGNDSEPRGLRDQIRAGAAGLKIHEDWGATPAAIDSCLSVCDELDVQCLIHTDTLNESGFVEQTIKALKGRVIHTYHTEGAGGGHAPDIISVCEHPNVLPSSTNPSRPYTLNTLDEHLDMVMVCHHLSKDIPEDVAFAESRIRAETIAAEDVLHDIGAISMMSSDSQAMGRCGEVVLRTWHTAHKNKLQRGVLPEDEGTGCDNFRAKRYVSKYTINPAIAQGMSHVIGSVEVGKVADLVLWKFAQFGVKPNLILKSGMIARAQMVFTYPFSTSSQFSHHLTILQGDANGSIPTIEPILSRPMWASCLPNTSIIFVSQSSVDDGVIDTYDIKKRVEPVKNCRNIGKEDMKFNDTMPKMHVDPESYTVEANGMVCDADPIDTLPLCQDYFIY

SEQ ID NO: 271 - protein, 835 aa, Nectria_haematococca
MHLVPKEIDKLVISQLGVLAQRRLARGVKLNHSEAAALIANNLHELIRDGNHTVADLMALGATMLGRRHVLPSVCSTLHEIQVEGTFPSGTYLVTVHNPISSDDGDLSRALYGSFLPVPDINAFPMAASEEYAHEKQPGAVVTVKSRVTLNEGRNRIRLQVTSKGDRPIQVGSHYHFIEVNPQLEFDRIRAYGYRLDIPAGTSVRFEPGDTKTVTLVEIGGNRVIRGGNNLASGVVDLSRADEILARLQVAGYAHAPEPAGDMAYINAFDMDRAAYATMFGPTTGDLVRLGSTDLWVSIERDETVYGDECKFGGGKTLREGMGQATGRPDAETLDLVVTNALIVDWTGIYKADIGVKEGMIVGIGKAGNPDVMDGVTPGMVVGSCTDVVAGEGKIVTAGAIDSHIHFICPQQVPEALASGVTTMLGGGTGPSAGTNATTCTPGAHYMRQMLQACDTLPINIGITAKGNDSAPEALREQVTAGACGLKLHEDWGCTPAAIDACLTVCDELDVQCLIHTDTLNESGFVESTIASFKGRTIHTYHTEGAGGGHAPDIISVVEHENVLPSSTNPTRPFTRNTLDEHLDMLMVCHHLSKNIPEDVAFAESRIRAETIAAEDVLHDLGAISMMSSDSQAMGRCGEVVLRTWNTAHKNKIQRGRLPEDEGTGADNARVKRYVSKYTINPAVAQGFSHLVGSIEVGKFADLVVWDPAWFGTKPSNVIKGGHIAYAQMGDPNASIPTVQPIIARPMFAPLCPSTSILFVSGASITSGAIASYNLRSRVEAVHGCRTVGKRDMRHNDRMPKMRVDPESYTVEADGEVCVAAPAETLPLTQQFYVY

SEQ ID NO: 272 - protein, 837 aa, Aspergillus_niger
MHLCPKELDKLVISQLGFLAQRRLARGIRLNHAEAAALISSNLQELIRDGQYSVADLMSIGKSMLGRRHVLPSVVSTLYELQVEGTFTTGTYLVTVHNPISSDDGDLEKALYGSFLPIPPADAFPDPDPEDYEPEKTPGAILPVKNERIILNEGRKRIKLKVMSRGDRPIQVGSHYHFIETNPQLHFDRLRSYGYRLDIPAGTSVRFEPGDTKVVTLVEIGGHRVIRGGNCIASGKVDLARAEEIMARLQVQNFAHVPEPTADSALVPTPFSMDREAYARMFGPTTGDLVRLGLTNLWVRVEKDYTSYGDECTFGGGKTIRDGMGQSSEKSTQHALDTVITNALIIDWTGIFKADIGIKDGLIVGIGKAGNPDIMDGVTPGMTVGSSTDVIAGENKIVTAGGFDTHIHFICPQQVDEALASGITTFLGGGTGPSTGSNATTCTPGPVHMRQMLQACDRLPINVGITGKGNDCGGVSIEEQIYAGAAGLKLHEDWGSTPAAIDSCLDLCDKFDVQCMIHTDTLNESGFVEQTIEAFKNRTIHTYHTEGAGGGHAPDIISVVEHPNVLPSSTNPTRPFTLNTLDEHLDMLMVCHHLSKNIAEDVAFAESRIRAETIAAEDVLHDLGAISMMSSDSQAMGRCGEVILRTWNTAHKNKEQRGPLPEDEGTGADNFRVKRYVSKYTINPAIAQGMSHMIGSIEVGKIADLVLWTPSAFGVKPTQVVKSGMIAVSVMGDPNASIPTVQPVIMRPQFGALVPSTSITFVSQASLDAGIVQSYNLQKRVEAVKNCRNIGKADMKFNDIMPKMHVDPESYRVEADGMLCDAEPAGSLPLTQDYFVY

SEQ ID NO: 273 - protein, 841 aa, Podospora_anserina
MLLVPREVSQSLDKLTISHLGFLAQRRLARGLKLNHSEAVALISSNIQELIRDGNHVVSDLMSLGSTMLGRRHVLPSVLSTLHEIQIEGTFPSGTYLVTVHNPISSDDGNLDRALYGSFLPVPSNDAFPAPPAEEYAPEAQPGAVVCVKDAVVRLNEGRRRIKLQVTSKGDRPVQVGSHYHFVEVNPELEFDRIAAVGYRLDIAAGTSVRFEPGDKKTVTLVEIGGHKVIRGGNRIANGVVEETRKNPDEIVKRLLDMGFAHTPQKDIVEFMEGFTMDRRAYNTMFGPTTGDLVRLGATDLWIKVERDYTVYGEECKFGGGKTLREGMGQATGRSDRDTLDLVVTNALVVDWTGIYKADIGVKEGFIVGIGKAGNPDVMDGVTEGMVVGSCTDVIAGEGKIITAGGIDTHIHFICPQQAEEALASGVTTFLGGGTGPSAGTNATTCTPGAHYMKQMLQATDSLPINIGITGKGNDSDPLAIREQIAAGACGLKLHEDWGTTPAAIDTCLSVCDEMDVQCMIHTDTLNEAGFVETAVAAFANRTIHTYHTEGAGGGHAPDIISVVEHPNVLPSSTNPTRPFTLNTLDEHLDMLMVCHHLSKNIPEDVAFAESRIRAETIAAEDVLHDLGAISMMSSDSQAMGRCGEVILRTWNTAHKNKLQRGPLPEDAPTGCDNVRVKRYVSKYTINPAIAQGFSHLIGSIEVGKLADFVVWDPAWFGTKPSLVVKSGLIAVAMMGDPNASIPTIQPVVARQMFARDLPGASVVFVSKESVENGNIKSYGLRKRVSAVRGCRGIGKRDMKWNDKMPRMRVDPERYVVEADGKRCEAEPSEKLPLTQGYFVY

SEQ ID NO: 274 - protein, 828 aa, Trichophyton_tonsurans
MRLVPRELGFLAQRRLARGVRLNHAEATALISSNLHELIRDGNHTVADLMAIGKSMLGRRHVLPSVVSSLTQLQVEGTFVCGSYLVTVHNPICSDDGDLEKALYGSFLPVPPEDLFPDPDPQEYLPERMPGAVVVVKNTKIELSPGRRRIKLRVTSKGDRPIQVGSHYHFIETNPQLEFDRAQAYGFRLDIPAGASHRFEPGESKTVQLVEIAGHKVIKGGNFLATGEINHGRKDRILSRIAEAGFMHTPEPMADASLIQPYTMTREAYARTFGPTTGDLIKLAATDLWVKVEKDLTTYGDECTFGGGKSLREGMGQATGRHAHEVLDTCLTNAVILDWSGIYKADIGIKDGIIVGIGKAGNPDVMDGISPGMVIGSSTDIIAAERMIVTAGGIDTHVHFICPQQVDEALSSGITTLLGGGTGPSEGSNATTCTPSPNSIRQMIQSSDGFPMNFAFTGKGNDSEPHGLRDQIRAGAAGLKIHEDWGATPAAIDSCLSVCDELDVQCLIHTDTLNESGFVEQTIKALKGRVIHTYHTEGAGGGHAPDIISVCEHPNVLPSSTNPSRPYTLNTLDEHLDMVMVCHHLSKDIPEDVAFAESRIRAETIAAEDVLHDIGAISMMSSDSQAMGRCGEVVLRTWHTAHKNKLQRGVLPEDEGTGCDNFRAKRYVSKYTINPAIAQGMSHVIGSVEVGKVADLVLWKFAEFGVKPNLILKSGMIARAQMGDANGSIPTIEPIISRPMWASCLPNTSIMFVSQSSVDEGVIDTYNIKKRVEPVKNCRNIGKEDMKFNDTMPKMHVDPESYTVEADGMVCDADPIDTLPLCQDYFIY

SEQ ID NO: 275 - protein, 855 aa, Sordaria_macrospora
MHLIPKELDKLAISQLGFLAQRRLARGVKLNHSEATALIANNLQELIRDGNHCVADLMALGATMLGRRHVLPEVTSTLHEIQVEGTFPSGTYLVTVHNPISSDDGDLARALYGSFLPIPPNDDSVFPLPPAAAYEASKQPGAVVCVKDAKVKLNEGRNRIRLKITSKGDRPIQVGSHYHFIETNPQLSFDRLRAYGYRLDIPAGTSVRFEPGDTKTVTLVEIGGNKVIRGGNNLASGRLDLSRAEEIIAKLQAAGFAHAPEPAGDAAFISEPFTMDRRAYAVMFGPTVGDMVRLGSTDLWIKVEKDYTVYGDECKFGGGKTLREGMGQATGRSDEETLDMVVTNALVVDWTGIYKADIGIKAGVIVGIGKAGNPDVMDGVTPGMIVGSCTDVVAGEGKIITAGGIDTHIHFICPQQAAEALAAGITTFLGGGTGPSAGTNATTCTPGAHYMRQMLQACDSLPLNIGITGKGNDSDPSALREQIRAGACGLKLHEDWGTTPAAIDSCLTVCDELDVQCLIHTDTLNESGFMESTIAAFAGRTIHTYHTEGAGGGHAPDIISVVEYPNVLPSSTNPTRPYTRNTLDEHLDMLMVCHHLSKNIPEDVAFAESRIRAETIAAEDVLHDLGAISMMSSDSQAMGRCGEVILRTWNTAHKNKLQRGFLPEDLAEAAANNGDGDSPENETQKADNYRVKRYISKYTINPALAQGMAHLIGSIEVGKLADLVVWDPAWFGTKPSLVIKSGLIACAMMGDPNASIPTVQPVISRQMFAPMVAQTKVLFVSQASIDSGAVPGYNLKSRVEAVRGCRTVSKRDMKFNEKTPRMKVDPERYTVEADGEVCEAEPSSELPLTQSWFVY

SEQ ID NO: 276 - protein, 836 aa, Gibberella_zeae
MHLVPKEIDKLVISQLGALAQRRLARGVKLNHSEAVALIANNLHELIRDGNHTVSDLMALGATMLGRRHVMPSVCATLHEIQVEGTFPSGTYLVTVHNPISSDDGDLRRALYGSFLPVPDNSIFPMAASEEYQLGKQPGAVIPVKTKKITLNEGRKRIRLQVTSMGDRPIQVGSHYHFIETNPQLEFDRIRSYGYRLDIPAGTSVRFEPGDTKTVTLVEIGGKRVIRGGNNLASGVVDLSRADEILARLQEAGYAHKSNPAGDMAHIDPFQMDHASYATMFGPTTGDLVRLGSTDLWIKVERDETIYGDECKFGGGKTLREGMGQASGRTDAETLDLVVSNALIVDWTGIYKADIGIKEGMIVAIGKAGNPDVMDGVTEGMVVGSCTDVVAGEGKIVTAGAIDSHIHFICPQQVPEALASGVTTMLGGGTGPSAGTNATTCTPGVHYMRSMLQACDQLPINIGITSKGNDSSPEGLRDQVNAGACGLKLHEDWGSTPAAIDTCLSVCDEFDIQCLIHTDTLNEAGFVESTIAAMKGRTIHTYHTEGAGGGHAPDIISVVEHENVLPSSTNPTRPFTLNTLDEHLDMLMVCHHLSKNIPEDVAFAESRIRAETIAAEDVLHDKGAISMMSSDSQAMGRCGEVILRTWNTAHKNKVQRGWLPEDEGTGADNARVKRYVSKYTINPAIAQGFGHVIGSIEVGKFADLVLWDPAWFGTKPSYVLKGGHIAYAQMGDPNASIPTVQPIIARPMFSPHCASTSILFVSSASIETGAIASYGLRSRVEAVRGCRSIGKSDMKHNDTKPRMRVDPESYTVEADGEICEAAPADTLPLTQQFYVY

SEQ ID NO: 277 - protein, 839 aa, Pyrenophora_teres
MQLVPKELDKLVISQLGLLAQRRLARGVKLNHAEATALIANNLQELIRDGNHTVADLMAIGKTMLGRRHVQPSVVASLAEMMVEGTFPTGTYLVTVHHPICTEDGDLGRALYGSFLPIPSNDMFPLPDSNVYEYTKQPGAIIAVRGEAGTIRLNEGRKRIKLNVKSMGDRPIQVGSHYHFIETNPQLQFDRVRAHGYRLDIPAGTSVRFEPGDTRTVTLVQIAGNQIIKGGNNIASGFIEDMSVAKGIVDKLQAGGFLHEPEPQGDAAHIDICTMERQTYISMFGPTTGDLVRLGATDLWIKVEKDMTKYGDECAFGGGKTLREGMGQAGGRSDKDSLDTVITNALIIDWSGIYKADIGIKDGIIVGIGKAGNPDVMDGVDPNLIVGSCTDVIAGEHKIVTAGGFDTHIHFICPQQAYEAIASGITTALGGGTGPSTGTNATTCTPGKTHIKQMLQALDTLPLNYGITGKGNDSDLRPLQQQAEAGVCGLKLHEDWGTTPSAIDACLTVCDEYDIQTLIHTDTLNESGFVESTIAAFKNRTIHTYHTEGAGGGHAPDIISVVEHDNVLPSSTNPTRPYTRNTLDEHLDMLMVCHHLSRNIPEDVAFAESRIRAETIAAEDVLHDLGAISMMSSDSQAMGRCGEVILRTWNTAHKNKVQRGALAEDEGTDADNFRVKRYISKYTINPAIAHGMSHLIGSIEVGKVADLVLWTPRNFGVKPNLVVKSGFCSWAMMGDPNASIPTVEPIIMRPMFAPLVPSSSITFVSQASVASGIVNSYGLRKRVEAVKNCRNIGKRDMKFNETRPKMKVDPETYTVEADGMVCTAEPAETLPLTQGYFVY

SEQ ID NO: 278 - protein, 826 aa, Botryotinia_fuckeliana
MHLIPKEIDKLAISQLGLLAQRRLARGVKLNHSEAVLIRDGNHTVADLMSIGATMLGRRHVQPAVCSTLTEIMVEGTFPTGTYLVTVHHPVSTDDGDLAKALYGSFLPIPDIDLFPLPLDAEYESTKRPGALITVKGKVKLNEGRKRIKLRVTSKGDRPIQIGSHYHFIETNPQLDFDRIKAYGYRLDIPAGTSVRFEPGDAKTVGLVEIGGNRVIRGGNHIATGKVDISRVEEILVNLQEAGFAHTPDPSGDTAFIDTFEMDRKAYATMFGPTVGDTIRLGNTDLWIKVEKDLTFYGDECKFGGGKSLREGMGQATGVSDDISLDLVIVNALIVDWTGIYKADIGVKNGTIVGIGKAGNPDVMDGVSPNMIVGSCTDVIAGEGKIITAGGFDTHIHFICPQQFNEALASGITTMLGGGTGPSAGTCATTCTPGKNYMRQMLQACDTLPMNVGITGKGNDSDPAALREQVIAGACGLKLHEDWGTTPSAIDSCLTVCDELDIQCLIHTDTLNESGFVESTIAAFKNRAIHTYHTEGAGGGHAPDIISVVEHANVLPSSTNPTRPYTRNTLDEHLDMLMVCHHLSKNIPEDVAFAESRIRAETIAAEDILHDLGAISMMSSDSQAMGRCGEVIMRTWNTAHKNKVQRGALGEDLGTGADNFRVKRYVSKYTINPALAQGMGHIIGSVEVGKLADLVVWDPAWFGTKPTTIIKSGMIAYAHMGDPNGSISTIQPIIARPMFAPLVPSTSILFVSESSISSGTIATYGLKSRVEAVKNCRVVGKKDMKFNDQMPKMKVDPENYRVEADGVHLVCEPADWLPLGQNAYVY

SEQ ID NO: 279 - protein, 836 aa, Aspergillus_oryzae
MHLIPKELDKLAISQLGFLAQRRLARGVRLNHAEAVALISSNLQELIRDGLYSVADLMSIGKTMLGRRHVLPSVVSTLVELQVEGTFPTGTYLVTVHHPISSDEGDLEKALYGSFLPIPPADAFPDPDPNDFEPEKMPGAIIPVKNERITLNEGRRRIRLKVMSKGDRPIQVGSHYHFIEVNPQLHFDRLRAYGYRLDIPAGTSVRFEPGDTKTVTLVEIAGHQVIKGGNFIASGKVDLSRVDEIMLRLQADGFAHIAEPTADAALVTPFTMDREAYARMFGPTTGDLVRLGLTNLWVRVEKDYTSYGDECSFGGGKTIRDGMGQSSEKSHQHCLDTVITNALIIDWSGIYKADIGIKNGIIVGIGKAGNPDIMDGVHPDMVVGSSTDVVAGENKIITAGGFDTHIHFICPQQVDEALASGITTFLGGGTGPSTGSNATTCTPGPTHMRQMIQACDHLPINVGITGKGNDCGGISIEEQIVAGAAGLKLHEDWGSTPAAIDTCLDMCDKYDVQCMIHTDTLNESGFVEQTIEAFKNRTIHTYHTEGAGGGHAPDIISVVEHPNVLPSSTNPTRPFTMNTLDEHLDMLMVCHHLSKNIAEDVAFAESRIRAETIAAEDVLHDLGAISMMSSDSQAMGRCGEVILRTWNTAHKNKEQRGPLKEDEGTGADNFRVKRYISKYTINPAIAQGMSHMIGSVEVGKIADLVFWHPSSFGTKPTQIMKSGMITAAQMGDPNGSIPTIEPVIMRPMFGAYVPSTSIMFVSQASIDAGTVQSYGIKKRIEAVKNCRNIGKADMKYNDTMPKMHVDAESYAVEADGVLCDAQPAVSLPLTQDFFVY

SEQ ID NO: 280 - protein, 1159 aa, Aspergillus_nidulans
MPKNDSKTVTIDVEEFTKTRDSFLAKLAQLQSLTFELSRAYINHTSAVLGQDNANVDISAITNTLAASLRDTGVLAAAGTGSGAESGEKKKRKRRADPNAPKRTLTPFFLYMHHNRARIAEELGPDAKPKDVSNEGTRRWAEMPDSQKEVWKKLYADNLAAYREKVAAYKAGLPFDRDDNDKAADQLHLDVAAAEASDEEEEEEEDEHGEEEEEEEEESPEPAKEPTPPPPKRRRSEGKPSKDVSSPVVEKKGRNESPEKKRRGAAKKDKEEPRKSLGGESKRSKKKRKSDYIPIREENWFASQLTILARRPFYFKYIPDIIKGRIHRQAWQYAPYSEGSFLAQRRLARGVRLNHAEAAALISSNLHELIRDGQYSVADLMSIGKTMLGRRHVLPSVPSTLVELQVEGTFTTGSYLVTVHHPISSDDGDLEKALYGSFLPIPPADTFPDPDPEDYLPEKVPGAVIPVKNARITLSEGRKRIKLKVMSKGDRPIQVGSHYHFIEANPQLHFDRFRAYGYRLDIPAGTSVRFEPGDTKTVTLVEIGGHRIIKGGNSLASGPVDLRRADDIIQRLQTAGFAHVPEPAADNALVAPFTIDREAYARLFGPTTGDLIRLGLTNLWVKIEKDYTHYGDECSFGGGKSIREGMGQASGKSHKDCLDTVITNAVIIDWSGIYKADIGIKNGTIVGIGKSGNPDVMDGVHPDMIIGSSTDVIAGENKIVTAGGFDTHIHFICPQQAQEALASGITTFLGGGTGPSTGTNATTCTPGPTHMRQMIQACDQIPINVGITGKGNDSGGIGIEEQIIAGAAGLKLHEDWGSTPAAIDTCLDICEKYDVQCMIHTDTLNESGFVEQTIQAFKNRTIHTYHTEGAGGGHAPDIISVVEHPNVLPSSTNPTRPFTMNTLDEHLDMLMVCHHLSKNIPEDVAFAESRIRAETIAAEDVLHDLGAISMMSSDSQAMGRCGEVILRTWNTAHKNKEQRGQLPEDENTGADNFRVKRYISKYTINPAIAQGMSHLIGSVEVGKLADLVIWSPSYFGTKPSQVLKSGMIVASMMGDPNGSIPTIQPVIMRPQFGAYLPSTSVMFVSQASLDTNTVQSYGLKKRVEAVKNCRNIGKADMKFNDTMPKMKVDPESYRVEADGRLCDAQPAETLPLTQDYFVY

SEQ ID NO: 281 - protein, 842 aa, Aspergillus_flavus
MHLIPKELDKLAISQLGFLAQRRLARGVRLNHAEAVALISSNLQELIRDGLYSVADLMSIGKTMLGRRHVLPSVVSTLVELQVEGTFPTGTYLVTVHHPISSDEGDLEKALYGSFLPIPPADAFPDPDPNDFEPEKMPGAIIPVKNERITLNEGRRRIRLKVMSKGDRPIQVGSHYHFIEVNPQLHFDRLRAYGYRLDIPAGTSVRFEPGDTKTVTLVEIAGHQVIKGGNFIASGKVDLSRVDEIMLRLQADGFAHIAEPTADAALVTPFTMDREAYARMFGPTTGDLVRLGLTNLWVRVEKDYTSYGDECSFGGGKTIRDGMGQSSEKSHQHCLDTVITNALIIDWSGIYKADIGIKNGIIVGIGKAGNPDIMDGVHPDMVVGSSTDVVAGENKIITAGGFDTHIHFICPQQVDEALASGITTFLGGGTGPSTGSNATTCTPGPTHMRQMIQACDHLPINVGITGKGNDCGGISTEEQIVAGAAGLKLHEDWGSTPAAIDTCLDMCDKYDVQCMIHTDTLNESGFVEQTIEAFKNRTIHTYHTEGAGGGHAPDIISVVEHPNVLPSSTNPTRPFTMNTLDEHLDMLMVCHHLSKNIAEDVAFAESRIRAETIAAEDVLHDLGAISMMSSDSQAMGRCGEVILRTWNTAHKNKEQRGPLKEDEGTGADNFRVKRYISKYTINPAIAQGMSHMIGSVEVGKIADLVFWHPSSFGTKPTQIMKSGMITAAQMGDPNGSIPTIEPVIMRPMFGVSPLHSAYVPSTSIMFVSQASIDAGTVQSYGIKKRIEAVKNCRNIGKADMKYNDTMPKMHVDAESYAVEADGVLCDAQPAVSLPLTQDFFVY

SEQ ID NO: 282 - protein, 838 aa, Agaricus_bisporus
MRLLPREEAKVLLHQVGFIAQKRLARGVKLNKTEAVALIASVLQERIRDGRHSVAELMQHGKKILGRRHVLPDVPALLHEIQVEGTFLDGVFLVTVHQPICTEDGDLEAALYGSFLPIPPQDDFPVAPDSDYLPEKTAGAIIPKQEDIVLNQGRERIRLRITNTGDRPIQVGSHYHFIETNRALSFDRLKSYGKRLDIAAGTAVRFEPGDTKAVTLVSISGNKVISGGNSLASGHIGTFRSEVLLEDILRRDFAHVSEPGALEVMEDTKIGRETYISMYGPTVGDRVRLGDTELWIEVEHDETVYGDEVKFGGGKVIREGMGQATNRSSNETLDLVITNALIVDWSGIYKADIGVKNGFICGIGKAGNPDVMSNIHPTLVIGSSTEVIAGEKLIITAGGIDTHIHFICPQLVDEALASGLTTLIGGGTGPSAGTNATTCTPSPFYMRHMLAATDGLPMNFGFTGKGNDAGPTAIEEIVRAGASGLKLHEDWGTTPAAIRNCLDVADKYDVQVTIHTDTLNESGFVESTIEAFGGRTIHTYHTEGAGGGHAPDIIVVCGQNNVLPSSTNPTRPYAKNTLDEHLDMLMVCHHLDKSIPEDLDFAESRIRAETVAAEDVLHDIGAISMISSDSQAMGRIGEVISRTWRTASKMREVRGPLTDLGDDGRKDNARVKRYIAKYTVNPAIAHGISHLVGHVAVGTLADLVLWKPENFGSKPEMILKAGVITYSQMGDANASIPSVQPFYSKPMWGAKPGSAALNSVAFVSQVSITSRVIESYGLSKKIEAVRGCRDIGKKDMKWNDTTPAMKVDPESYEVRADGVLMDVKPVERVALATPYNLF

SEQ ID NO: 283 - protein, 843 aa, Oryza_sativa
MKLVQREAEKLALHNAGFLAQKRLARGLRLNYTEAVALIAAQILEFVRDGDRTVTDLMDLGKQLLGRRQVLPAVPHLLETVQVEGTFMDGTKLITVHDPISSDDGNLELALHGSFLPVPSLEKFSSVGVDDFPGEVRFCSGHIVLNLHRRALTLKVVNKADRPIQIGSHYHFIEANPYLVFDRQRAYGMRLNIPAGTAVRFEPGDAKTVTLVSIGGRKVIRGGNGIADGAVNRSQLNEVMEKVIAKGFGHEDYPDSSEGIIGDGTHDYIVDHEKYASMYGPTTGDKIRLGDTDLFAEIEKDYAIYGDECIFGGGKVLRDGMGQSAGYPASDCLDTVVTNAVVIDYTGIYKADIGINGGLIVAIGKAGNPDVMDMDGVNEEMIVGVNTEVIAAEGMIVTAGGIDCHVHFICPQLAEEAIASGITTLVGGGTGPAHGTCATTCTPSPSHMKLMLQSTDELPINMGFTGKGNTTKPDGLAEIIKAGAMGLKLHEDWGSTPAAIDNCLSVAEAFDIQVNIHTDTLNESGCVEHTIAAFKDRTIHTYHSEGAGGGHAPDIIKVCGVKNVLPSSTNPTRPFTLNTVDEHLDMLMVCHHLDRNIPEDVAFAESRIRAETIAAEDILHDMGAISIISSDSQAMGRIGEVITRTWQTANKMKRQRGRLPISSSPDAAEDNDNFRIRRYIAKYTINPAIVNGFSDFVGSVEVGKLADLVIWKPSFFGAKPEMVIKGGAIACANMGDPNASIPTPEPVMMRPMFGAFGGAGSANSIAFVSKAAKEAGVAVQYKLGKRVEAVGRVRGLTKLNMKLNDALPKIDVDPETYTVTADGEVLRCQPTPTVPLSRNYFLF

SEQ ID NO: 284 - protein, 838 aa, Laccaria_bicolor
MHLLPREEAKLLLHQAGFLAQKRLARGLRLNQTETVALIASQLQERIRDGVYSVAELMHHGKTLLGRRHVLPSVPALLHEIQVEGTFQDGVFLVTVHDPICTDSGNLESALYGSFLPIPSETLFPLLDESEYASEKVPGAIISKKERIILNKGRDRVRLRVTNNGDRPVQIGSHYHFIEVNPMLSFDRAKAYGKRLDVAAGSAVRFEPGDVKSVTLVSIAGTRIISGGNNLATGVVDLSRTDDIIFGLLQRGFSHVPEPGALEVQEDTDIGREKYISMFGPTVGDRVRLGDTLLWIEVEHDETVYGDEVKFGGGKSIREGMGQATNRSSTETLDLVITNALIIDWSGIYKADIGVKDGLIAGIGKAGNPDVMANVHPALIIGSSTEVIAGEKLIITAGAIDAHVHYICPQQVEEALAAGTTTMIGGGTGPSAGTNATTCTSSPFYMRHMLAATDELPMNFMFTGKGNDAGPMAVEEVVRAGAGGLKLHEDWGSTPAAIVNCLDVADKYDVQVNIHTDTLNESGFVESTIAAFGKRTIHTYHSEGAGGGHAPDIIVVCGLENVLPSSTNPTRPYTNNTLEEHLDMLMVCHHLDKSIPEDLAFAESRIRAETVAAEDVLHDSGAISIISSDSQAMGRVGEVVSRTWRTASKLREFRGPLTSLGDVEGKDNGRVKRYISKYTINPAITHGISHLVGHVAVGTLADLVLWKPENFGSKPEMVLKSGVIVWAQIGDANASIPTVQPFYSKPMWGAKPRSASLNSVSFVSQISITSGVIASYGLSKRFEAVRGCRAVTKKDMKWNVATPKMTVDPESYEVRADGELMDIEPATTLPLSRVYNLF

SEQ ID NO: 285 - protein, 841 aa, Sorghum_bicolor
MKLLPREADKLALHNAGFLAQKRLARGLRLNYTEAVALIAAQILELIRDGDKTVTDLMDLGKQLLGRRQVLPAVPYLLHTVQVEGTFVDGTKLVTVHDPISLDDGNLELALHGSFLPVPSPEKFSSDDVEEYPGEIHYSSTRIVLNLHRRALTLKVVNKADRPIQIGSHYHFIETNPYLVFDRKRAYGMRLNILAGTAVRFEPGDAKSVTLVSIGGHKVIRGGNGIADGPIDSSRLNEVMQKVNANSFGHEDYPDAREGLIGDGPFDCTVDREKYASIYGPTTGDKIRLGDTNLYAEIENDFAIYGDECVFGGGKVLRDGMGQATGYPESSCLDTVITNAVVIDYTGIYKADIGIKDGLIVAIGKAGNPDVMDGVHSNMIVGVNTEVIASEGMIVTAGGIDCHVHFICPQLAEEAIASGITTLVGGGTGPAHGTCATTCTPAPSQMKLMLQSTDQLPINMGFTGKGNTSKPEGLAEIIKAGAMGLKLHEDWGTTPSAIDNCLSVAEDFDIQVNIHTDTLNESGCVEHTIAAFKDRAIHTYHSEGAGGGHAPDIIKVCGVKNVLPSSTNPTRPFTSNTVDEHLDMLMVCHHLDKNIPEDVAFAESRIRAETIAAEDILHDMGAISIISSDSQAMGRIGEVITRTWQTANKMKVQRGSLPGSADSNAAQNNDNLRIRRYIAKYTINPAIVNGFSDFVGSVEVGKLADLVLWKPSFFGAKPELVVKGGAIAWANMGDPNASIPTPEPVVMRPMFGAFGKAGSSNSIAFVSKAAKEAGVAMEYKLEKRVEAVGGVRGLTKLDMKLNDALPRIEVDPETYTVTADGEVLTCQPAPTVPLSRNYFLF

SEQ ID NO: 286 - protein, 835 aa, Selaginella_moellendorffii
MRLGPKEIDKLLLHEAGFLAQKRLARGLPLNYPEAVALIATQVLEFIRENKSVAELMDLGRQLLGKRQVLPEVGHLLEMVQVEGTFADGTKLVTVHHPIVKENGDLALALHGSFLPVPSVDVFPEFQEQPAPGMLVLASGHIFINAGRKGLKLTVSNTADRPIQVGSHYHFVETNPYLVFDREKSYGMRLNILAGTAVRFEPGETKTVALVSIGGKSVIRGGNGIAEGPVDSSRLPKIMEELSLRNFGHKQQNDALPVEDASCPISREVYTNIFGPTTGDKIKLGDTELYAQIEKDFTFYGDECKFGGGKVIRDGMGQGTGYKADETLDTVITNAVVIDYTGIYKADVGIKHGYICGIGKAGNPDVMDAVSSNMIVGVNTEVVAGEGLILTAGGIDSHVHFICPQLSTEAIASGLTTLIGGGTGPAHGTCATTCTPAVDQMRLMLRSTDDFPINFGFTGKASESIKFSFEGLDDIIRAGAIGLKLHEDWGTTPAAIDRCLDVADKFDIQVTIHTDTLNESGCVEHSIAAFKNRTIHTYHSEGAGGGHAPDIIKVCGLPNVLPSSTNPTRPFTKNTIDEHLDMLIVCHHLNRNIPEDVAFAESRIRNETIAAEDILHDMGAISMMSSDSQAMGRIGEVITRSWQTAHKMKLQRGPLPEDRENNNDNFRVRRFIAKYTINPAVAHGVSHIVGSIEVGKLADLVLWKPGFFGAKPELVIKGGDVAWAQMGDANASIPTPEPVIMRPMFAACGKAASSSSIAFVSKAAKDLNVGQAYGLTKRIEAVKNVRNLSKADMKLNSETPCIEVDPESYEVTADNIPLVCSPAEKLPLATNYFLF

SEQ ID NO: 287 - protein, 839 aa, Piriformospora_indica
MRILPRELDKLLLHQAGSLAQKRLARGLKLNLTEATALIASVLQERIRDGEHTVAELMQHGKNLLGRRHVLPGVMHQLHEIQVEGTFPDGVFLVTVHDPICSDDGNIHNALYGSFLPPPPKGTFALPEPEPLTEVPGAIVVKTDSPILLNEGRGRVQLKVTNNGDRPIQVGSHYHFIETNKALTFDRGLAYGKRLDIAAGTAVRFEPGDPKLVTLCDIGGQRIISGGNRIASGPVDLGRTEEIVSSLVQKAFGHVPEPGALTTNSETTISREAYVSMFGPTVGDLVRLGDTPLWIEVERDETVYGDECKFGGGKVIREGMGQTTNRPASDCIDLLITNALIVDWSGIYKADIGVKNGLICGIGKAGNPEVMAGVHENLIVGSSTEVLAGEKLIVTAGAIDAHIHYICPQQCEEAIASGATTFIGGGTGPCAGTAATTCTPSPFYMQHMMAATDTIPLNFLFTGKGNDAGPNALEDIVKAGAGGLKLHEDWGSTPAVITNALDIGDKYDVQINIHTDTLNESGFVDSTIEAFGGRTIHTYHTEGAGGGHAPDIIVVCEHENVLPSSTNPTRPFAHNTLDEHLDMLMVCHHLDKSIPEDLAFAESRIRGETVAAEDVLHDMGAISIISSDSQAMGRVGEVVSRTWRTAAKMKALRGPLKELGDGEGNKNDNGRVKRYIAKYTINPALAHGISHLVGHVSVGTMADLVLWKPENFGSKPEMILKSGVITWAQMGDANASIPTVQPFYSRPMWGSKAASAALNSVTFVSEISLSSGTIASYKLSRRFEAVKGCRTVKKKDMKWNDATPKMRVDPNTYAVHADGVLVDIEPAVTVPLTKSYNLF

SEQ ID NO: 288 - protein, 837 aa, Physcomitrella_patens
MKLSPREVNKLTLHGAGVLAQKRLARGLRLNHPEAIALIATQVLEFIREGKSVAELMDLGKRMLGRRQVMPGVPYLVESVQVEGTFRDGTKLVTIHEPFSSEDGDLALALHGSFLPVPPLGAFHFHMEAMYPGKLITEKGEIVINQGRRAVMLTVSNRADRPIQIGSHYHFIETNPYLCFDREKAYGMRLNISAGSAVRFEPGDTKRVTLVSIGGKKVIKGGNGLASGPVDHSRLPTIMESILAKNFLHAHESNALTGVSGVDSTLTFKVDKEHYAHIYGPTTGDKVQLGDTNLCAKVEKDYTFYGDECQFGGGKVLRDGMGQASGCGENETLDTVITNALVIDHTGIYKADIGIKGGIIVGIGKAGNPDVMDGVTEGMIVGVNTEAIAGEGMILTAGGIDSHVHYICPQLADEAIAAGLTTLIGGGTGPAHGTCATTCTPSSEHMRLMLQATDEIPLNIGFTGKGNTSDVEGLPEIIRAGAIGLKLHEDWGTTPAAIRNCLNVADEYDIQVTIHTDTLNESGCVEQSIEAFGGRTIHTYHSEGAGGGHAPDIIKVCGLPNILPSSTNPTRPYTVNTIDEHLDMLMVCHHLNKNISEDVSFAESRIRGETIAAEDILHDMGAISMMSSDSQAMGRIGEVITRTWQTAHKMKSQRKQLPETRNDDNDNLRIRRYIAKYTINPAIAHGVSHLIGSVEVGKLADLVLWQPGHFGAKPEMVLKCGFIAWAQMGDANASIPTPEPKLMRPMFGAHGKACSSQSIAFVSKAALEAGVKAAYGLQKRVEAVQNVRNIGKADMKLNNATPVIEVDPETYHVTADKVPLVCEPAESLPLSQTYFLF

SEQ ID NO: 289 - protein, 868 aa, Ustilago_maydis
MHLLPRERDKLLLHHAGSLAQKRLARGVRLNQTEATALIATVLQERIRDGEHSVAELMQHGKTLLGRCHVLPGVPELLHEVMVEGTFSDGSFLVTVHQPVCTETGDIQAALYSSFYPAPDVSVFLAQMQAETKALVGKAAAEEVLPGALVTKRGAQPIQLCPKRKRVAVKVTNTGDRPIQVGSHYPFLETNAALSFPRMLALGKRLDIAAGTAIRFEPGDSKTVTLVQVGGTKILAGGNNLAAGPLDEFLATSESQVALVKRIEAAGFANEPLPDMEDDSIPAPAPCELSRDAYASLYGPTVGDKVRLADSPLWLEVEKDFTVYGDELKFGGGKVLRDGMGQASGRADSAVLDIVIINALIVDWWGIVKADIGIRNGHIVAIGKAGNPAIMDGVDPNLVVGSCTEVIAGEKFIVTAGAIDAHVHYICPDLHEEALATGITTLIGGGTGPTAGSSATTCTPGQDQLRNMMIATDNVPLNFAFTGKGNDSGLAGLEDQIRAGCAGMKIHEDWGATPAVIDACLTACDKYDVQCNIHTDTLNESCFVEGTLAAFKGRTIHTYHSEGAGGGHAPDIIRVCGETNVLPSSTNPTRPYAKNTLDEHLDMLMVCHHLSKDIVEDVAFADSRIRAETVAAEDVLQDSGAISMISSDSQAMGRIGEVVSRTWRTASKMASLVGPLHEPGSDPQTKGVPHPSEAVSDNLRIKRYVAKYTINPALVHGCSHLIGSIEPGKLADLVFYLPSKFGICPEFVLKGGQVAWAQMGDANASIPTVQPIYGRPMHGSNTNAASHNSVLFVSQISVDQGTVRGYGVNKRIEGVKGCRTVSKKDMKLNTHTPDLKVDPETYEVTDGGRLLTVPPADELPLTQSLHLF

SEQ ID NO: 290 - protein, 837 aa, Glycine_max
MKLSPREIEKLDLHNAGYLAQKRLARGLRLNYVETVALIATQILEFVRDGEKTVAQLMCIGRELLGRKQVLPAVPHLVESVQVEATFRDGTKLVTIHDLFACENGNLELALFGSFLPVPSLDKFTENEEDHRTPGEIICRSENLILNPRRNAIILRVVNKGDRPIQVGSHYHFIEVNPYLTFDRRKAYGMRLNIAAGNATRFEPGECKSVVLVSIGGNKVIRGGNNIADGPVNDSNCRAAMKAVVTRGFGHVEEENAREGVTGEDYSLTTVISREEYAHKYGPTTGDKIRLGDTDLFAEIEKDFAVYGDECVFGGGKVIRDGMGQSSGHPPEGSLDTVITNAVIIDYTGIIKADIGIKDGLIISTGKAGNPDIMNDVFPNMIIGANTEVIAGEGLIVTAGAIDCHVHFICPQLVYDAVTSGITTLVGGGTGPADGTRATTCTPAPNQMKLMLQSTDDMPLNFGFTGKGNSAKPDELHEIIRAGAMGLKLHEDWGTTPAAIDSCLTVADQYDIQVNIHTDTLNESGFVEHTIAAFKGRTIHTYHSEGAGGGHAPDIIKVCGEKNVLPSSTNPTRPYTHNTIDEHLDMLMVCHHLNKNIPEDVAFAESRIRAETIAAEDILHDKGAISIISSDSQAMGRIGEVISRTWQTADKMKSQRGPLQPGEDNDNFRIKRYVAKYTINPAIANGLSQYVGSVEAGKLADLVLWKPSFFGAKPEMVIKGGEVAYANMGDPNASIPTPEPVIMRPMFGAFGKAGSSHSIAFVSKAALDEGVKASYGLNKRVEAVKNVRKLTKRDMKLNDTLPQITVDPETYTVTADGEVLTCTAAKTVPLSRNYFLF

SEQ ID NO: 291 - protein, 840 aa, Canavalia_ensiformis
MKLSPREVEKLGLHNAGYLAQKRLARGVRLNYTEAVALIASQIMEYARDGEKTVAQLMCLGQHLLGRRQVLPAVPHLLNAVQVEATFPDGTKLVTVHDPISRENGELQEALFGSLLPVPSLDKFAETKEDNRIPGEILCEDECLTLNIGRKAVILKVTSKGDRPIQVGSHYHFIEVNPYLTFDRRKAYGMRLNIAAGTAVRFEPGDCKSVTLVSIEGNKVIRGGNAIADGPVNETNLEAAMHAVRSKGFGHEEEKDASEGFTKEDPNCPFNTFIHRKEYANKYGPTTGDKIRLGDTNLLAEIEKDYALYGDECVFGGGKVIRDGMGQSCGHPPAISLDTVITNAVIIDYTGIIKADIGIKDGLIASIGKAGNPDIMNGVFSNMIIGANTEVIAGEGLIVTAGAIDCHVHYICPQLVYEAISSGITTLVGGGTGPAAGTRATTCTPSPTQMRLMLQSTDYLPLNFGFTGKGSSSKPDELHEIIKAGAMGLKLHEDWGSTPAAIDNCLTIAEHHDIQINIHTDTLNEAGFVEHSIAAFKGRTIHTYHSEGAGGGHAPDIIKVCGIKNVLPSSTNPTRPLTSNTIDEHLDMLMVCHHLDREIPEDLAFAHSRIRKKTIAAEDVLNDIGAISIISSDSQAMGRVGEVISRTWQTADPMKAQTGPLKCDSSDNDNFRIRRYIAKYTINPAIANGFSQYVGSVEVGKLADLVMWKPSFFGTKPEMVIKGGMVAWADIGDPNASIPTPEPVKMRPMYGTLGKAGGALSIAFVSKAALDQRVNVLYGLNKRVEAVSNVRKLTKLDMKLNDALPEITVDPESYTVKADGKLLCVSEATTVPLSRNYFLF

SEQ ID NO: 292 - protein, 835 aa, Vitis_vinifera
MKLSPREVDKLLLHNAGFLAQKRLASGLRLNYTEAVALIASQILAFVREGEKTVAELMDIGKQLLGRRQVLPAVPHLLHTVQVEGTFPDGTKLVTVHDAIASENGNLDLALHGSFLPVPSVDKFPDMEDDRIPGEIRYGGGTIMLNSCRKAIVLRVTNTGDRPIQVGSHYHFIEVNPALVFDRRKAHGMRLNIPAGTATRFEPGETKRVSLVRIGGKQVIRGGNCIIDGPVDDTNITAVMESESMVRFGHSEEAHVSEGVIGEDPDLAIRMSHEAYANMYGPTTGDKIRLGDTELYAEIESDFAVYGDECVFGGGKVIRDGMGQACMYAAAECVDTVITNAVVIDYTGIFKADIGIKDGLIVSLGKAGNPDIMHGAHMIIGVSTEVIAGEGMIVTAGAIDCHVHFICPQLAYEAISSGITTLVGGGTGPADGTRATTCTPAASHMKFMLQSTDDLPLNFGFTGKGNSAKPDGLHEIIRAGAMGLKLHEDWGTTPAAIDNCLTVAEQYDIQVNIHTDTLNESGFVEHTIAAFKDRTIHTYHSEGAGGGHAPDIIKVCGVKNVLPSSTNPTRPFTSNTIDEHLDMLMVCHHLDKDIPEDVAFAESRIRAETIAAEDILHDMGAISIIASDSQAMGRIGEVIIRTWQTAHKMKLQRGSLDASGVDNDNLRIKRYIAKYTINPAIANGFSRFVGSIEVGKVADLVLWNPSFFGAKPEMVIKGGVIAWANMGDPNASIPTPEPVMMRPMFGAFGKAGSANSIAFVSKVAAECGIKTHYGLTKRVEAVGNVRRLTKLDMKLNDALPVITVDPETYTVTADGVTLSCPAATTVPLSRNYFLF

SEQ ID NO: 293 - protein, 837 aa, Morus_alba
MKLTPREIEKLDLHNAGFLAQKRLARGLRLNYTEAVALIATQILEFVRDGDKTVAELMDIGRQLLGRRQVLPAVPHLLDTVQVEGTFPDGTKLITIHDAISSEEGNLELALRCSFLPVPSSEKFTRTEDDVHPGEIIFRSGDITLNPYRRAVVLKVINTGDRPVQIGSHYHFIEVNPSLVFDRKKAYGMRLNIPAGTATRFEPGENKSVKLVSIGGKRVIRGGNAIVDGPVDDAKWEEVLEALSARGFGNKEEENASEGITGENLDFTAVISREAYANIYGPTTGDKIRLGDTNLYTEIERDFAVYGDECVFGGGKVLRDGMGQACGYPPDGALDTVITNAVIIDYSGIFKADIGIRDGLIVSLGKAGNPDIMDGVFSNMIIGVNTEVIAGEGKIITAGAIDCHVHFICPQLAYEAIASGITTLVGGGTGPAEGTRATTCTPAPSHMKLMLQSTDDLPLNFGFTGKGNSSTPDELHEIIKAGAMGLKLHEDWGTTPAAIDNCLAVAELHDVQVNIHTDTVNESGFVENTIAAFKGRTIHAYHSEGAGGGHAPDIIRVCGVKNVLPSSTNPTRPFTSNTIDEHLDMLMVCHHLDKNIPEDVKFADSRIRAETIAAEDILHDMGAISIISSDSQAMGRIGEVIARTWQTAHKMKSQRGSIDPNGSNNDNLRIKRYVAKYTINPAIANGISQYVGSVEVGKLADLVLWKPSFFGAKPEMIIKGGVIAWANMGDPNASIPTPEPVLMRPMFGAFGKAGSANSIAFVSKVAADNGIKNLYGLQKSVRAVNNVRKLTKLDMKLNDALPNITVDPETYTVTADGEVPTCDAATTVPLSKNYFLF

SEQ ID NO: 294 - protein, 834 aa, Solanum_tuberosum
MKLAPREIEKLMLHNAGYLAQKRLARAQLLNYTEAVALIATQVLEFVRDGDKSVAELMDIGRQLLGRRQVLPTVPHLLDCVQVEGTFPDGTKLITIHDPIACENGNLDLALHGSFLPVPPQEKFPVIEDSKIPGQMCFGGGLIVLNPQRKAVILKVTNTGDRPIQVGSHYHFIEVNPSLIFDRMKALGMRLNIPAGAATRFEPGETRSVVLIGISGKKVIRGGNAIADCPVDDAKVMTLMGALSEGGFGHLEEPNPREGVVGEESCFSFSMTHEEYANMFGPTTGDRIRLGDTDLFAEIEKDFGIFGDECVFGGGKVLRDGMGQACGYPPADCLDTVITNAVVIDYTGIFKCDIGIKDGHIVSLCKAGNPDIMDSDAIIGVNTEVIAGEGMIVTAGAIDCHVHFICPQLAYEAISSGITTMVGGGTGPAHGTRATTCTPGHVHMELMLQSTDEIPLNFGFTGKGNSSKADGLHEIIKAGAMGLKLHEDWGTTPAAIDMCLTVADQYDIQVNIHTDTLNESGFVEHTIAAFKGRTIHTYHSEGAGGGHAPDIIKVCGVKNVIPSSTNPTRPFTLNTVDEHLDMLMVCHHLCKNSREDVAFAESRIRAETIAAEDILHDMGAISIISSDSQAMGRIGEVICRTWQTAHKMKLFRGPLDIDGSDNDNFRIKRYIAKYTINPAIANGISQFVGSVEVGKLADLVVWKPSFFGAKPEMVIKGGVIAWSNMGDPNASIPTPEPVTMRPMFGAFSKAASSNSIAFVSKAALDAGIKDSYRLNKRVEAVTNVRNISKLDMKLNDALPDIKVDPETYTVTADGTALTCPPATTVPLSRNYFLF

SEQ ID NO: 295 - protein, 834 aa, Solanum_tuberosum
MKLAPREIEKLMLHNAGYLAQKRLARAQLLNYTEAVALIATQVLEFVRDGDKSVAELMDIGRQLLGRRQVLPTVPHLLDCVQVEGTFPDGTKLITIHDPIACENGNLDLALHGSFLPVPPQEKFPVIEDSKIPGQMCFGGGLIVLNPQRKAVILKVTNTGDRPIQVGSHYHFIEVNPSLIFDRLRAHGMRLNIPAGAATRFEPGETRSVVLIGISGKKVIRGGNAIADCPVDDAKVMTLMGALSEGGFGHLEEPNSREGVVGEESCFSFSMTHEEYANMFGPTTGDRIRLGDTDLFAEIEKDFGIFGDECVFGGGKVLRDGMGQACGYPPADCLDTVITNAVVIDYTGIFKCDIGIKDGHIVSLCKAGNPDIMDSDAIIGVNTEVIAGEGMIVTAGAIDCHVHFICPQLAYEAISSGITTMVGGGTGPAHGTRATTCTPGHVHMELMLQSTDEIPLNFGFTGKGNSSKPDGLHEIIKAGAMGLKLHEDWGTTPAAIDMCLTVADQYDIQVNIHTDTLNESGFVEHTIAAFKGRTIHTYHSEGAGGGHAPDIIKVCGVKNVIPSSTNPTRPFTLNTVDEHLDMLMVCHHLCKNSREDVAFAESRIRAETIAAEDILHDMGAISIISSDSQAMGRIGEVICRTWQTAHKMKSFRGPLDIDGSDNDNFRIKRYIAKYTINPAIANGISQYVGSVEVGKLADLVVWKPSFFGAKPEMVIKGGVIAWSNMGDPNASIPTPEPVTMRPMFGAFSKAASSNSITFVSKAALDAGIKDSYRLNKRVEAVTNVRNISKLDMKLNDALPDIKVDPETYTVTADGTALTCPPATTVPLSRNYFLF

SEQ ID NO: 296 - protein, 838 aa, Arabidopsis_thaliana
MKLLPREIEKLELHQAGFLAQKRLARGIRLNYTEAVALIATQILEFIRDGDKSVAELMDIGRQLLGRRQVLPAVLHLLYTVQVEGTFRDGTKLVTVHEPISLENGNLELALHGSFLPVPSLDKFPEVHEGVIIPGDMKYGDGSIIINHGRKAVVLKVVNTGDRPVQVGSHYHFIEVNPLLVFDRRKALGMRLNIPAGTAVRFEPGERKSVVLVNIGGNKVIRGGNGIVDGLVDDVNWTVLMETMERRGFKHLEDIDASEGIAGEDPRFTTMISREKYANMYGPTTGDKLRLGDTNLYARIEKDYTVYGDECVFGGGKVLREGMGQGIEQAEALSLDTVITNSVIIDYSGIYKADIGIKNGHIVGIGKAGNPDTMHGVQNNMLIGNKTEVIAGEGMIVTAGAIDCHVHFICPQLVYEAVSSGITTMVGGGTGPAYGTRATTCTPSPFDMKLMLQSTDSLPLNFGFTGKGNTAKPLELRHIVEAGAMGLKLHEDWGTTPAAIDNCLAVAEEYDIQVNIHTDTLNESGFVEHTINAFRGRTIHTYHSEGAGGGHAPDIIRVCGVKNVLPSSTNPTRPYTKNTVDEHLDMLMVCHHLDKNIPEDVAFAESRIRAETIAAEDILHDMGAISIISSDSQAMGRIGEVISRTWQTADKMKAQRGAIDPNMADDDNSRIKRYIAKYTINPAIANGFADLIGSVEVKKLADLVIWQPAFFGAKPEMIIKGGNIAWANMGDANASIPTPEPVISRPMFGAFGKAGSENSVAFVSKAALRKGVKELYGLKKRVVAVSNVRQLTKLDMKLNDALPEITVDPETYVVTANGEVLTCAPADSVPLSRNYFLF

SEQ ID NO: 297 - protein, 837 aa, Arabidopsis_lyrata
MKLLPREIEKLELHQAGFLAQKRLARGIRLNYTESVALIATQILEFIRDGEKSVAELMDIGRQLLGRRQVLPAVVHLLYTVQVEGTFRDGTKLVTVHEPISLENGNLELALHGSFLPVPSLDKFPEAHEDVIPGDMKYGDGSIIINHGRKALVLKVVNTGDRPVQVGSHYHFIEVNPLLVFDRRKALGMRLNIAAGTAVRFEPGERKSVKLVNIGGNKVIRGGNGIVDGLVDDVNWTVVMEIMERRGFRHLEDADASEGIVGEDPRFTTTISREKYANMYGPTTGDKLRLGDTNLYARIEKDYTVYGDECVFGGGKVLREGMGQGIEQSEALSLDTVITNSVIIDYSGIYKADIGIKNGHIVGLGKAGNPDTMHGVQSNMLIGNKTEVIAGEGMIVTAGAIDCHVHFICPQLVYEAVSSGITTMVGGGTGPAYGTRATTCTPSPFDMKLMLQSTDSLPLNFGFTGKGNTAKPLELQHIVEAGAMGLKLHEDWGTTPAAIDNCLAVAEEYDIQVNIHTDTLNESGFVEHTINAFRGRTIHTYHSEGAGGGHAPDIIRVCGVKNVLPSSTNPTRPYTKNTVDEHLDMLMVCHHLDKNIPEDVAFAESRIRAETIAAEDILHDMGAISIISSDSQAMGRIGEVISRTWQTADKMKAQRGAIDPSMADDDNSRIKRYIAKYTINPAIANGFADLIGSVEEKKLADLVIWQPAFFGAKPEMIIKGGNIAWANMGDANASIPTPEPVISRPMFGAFGKAGSENSVAFVSKAALRNGVKELYGLKKRVVAVSNVRQLTKLDMKLNDALPDITVDPETYIVTANGEVLTCAPADSVPLSRNYFLF

SEQ ID NO: 298 - protein, 841 aa, Brachypodium_distachyon
MKLVPREAEKLALHGAGFLAQKRLARGLRLNYTEAVALIASQILEFVRDGDKSVTDLMDLGKQMLGRRQVLPAVPHLLDTVQVEGTFMDGTKLITVHDPISSDDGNLELALHGSYLPVPSHEIFSGSDADDSPGEVHFCSGRIILNLHRRALTLKVVNKADRPIQIGSHYHFIEANPYLIFDRKRAYGMRLNIPAGTAVRFEPGDSKRVTLVSIGGQKVIRGGNGIADGAVNSSQLNEVIKKVTENGFGHEDYPDASEGLIGDGTLDCSIDHEKYCSMYGPTTGDKIRLGDTDLFAEIEKDFAVYGDECLFGGGKVLRDGMGQSAGYPASACLDTVITNAVVIDYTGIYKADIGIKDGLIIAIGKAGNPDVMDGVHSNMIVGVNTEVIAAQGMIVTAGGIDCHVHFICPQLAEEAIASGITTLVGGGTGPAHGTCATTCTPAPSQMKLMLQSTDEIPINMGFTGKGNTAKPDGLPEIIKAGAMGLKLHEDWGSTPAAINNCLCVAEAFDIQVNIHTDTLNESGCVEHTIAAFKDRTIHTYHSEGAGGGHAPDIIKVCGVKNVLPSSTNPTRPFTSNTVDEHLDMLMVCHHLDKNIPEDVAFAESRIRAETIAAEDILHDMGAISIISSDSQAMGRIGEVIIRTWQTANKMKVQRGRLPGSGDSDPSKDNDNFRIRRYIAKYTINPAIVNGFSDFVGSVEVGKLADLVLWKSSFFGAKPELIIKGGAIAWANMGDPNASIPTPEPVMMRPMFGAFGKAGSSNSIAFVSKAAKEAGVASEYKLSKRVEAVGGVRGLTKLDMKLNDALPKIEVDPETYTVSADGEVLTCQPATTVPLSRNYFLF

SEQ ID NO: 299 - protein, 354 aa, Arabidopsis_thaliana
MSLLSDLVNLNLTDATGKIIAEYIWIGGSGMDIRSKARTLPGPVTDPSKLPKWNYDGSSTGQAAGEDSEVILYPQAIFKDPFRKGNNILVMCDAYTPAGDPIPTNKRHNAAKIFSHPDVAKEEPWYGIEQEYTLMQKDVNWPIGWPVGGYPGPQGPYYCGVGADKAIGRDIVDAHYKACLYAGIGISGINGEVMPGQWEFQVGPVEGISSGDQVWVARYLLERITEISGVIVSFDPKPVPGDWNGAGAHCNYSTKTMRNDGGLEVIKKAIGKLQLKHKEHIAAYGEGNERRLTGKHETADINTFSWGVANRGASVRVGRDTEKEGKGYFEDRRPASNMDPYVVTSMIAETTILG

SEQ ID NO: 300 - DNA, 1065 bp, Arabidopsis_thaliana
atgtctctgctctcagatctcgttaacctcaacctcaccgatgccaccgggaaaatcatcgccgaatacatatggatcggtggatctggaatggatatcagaagcaaagccaggacactaccaggaccagtgactgatccatcaaagcttcccaagtggaactacgacggatccagcaccggtcaggctgctggagaagacagtgaagtcattctataccctcaggcaatattcaaggatcccttcaggaaaggcaacaacatcctggtgatgtgtgatgcttacacaccagctggtgatcctattccaaccaacaagaggcacaacgctgctaagatcttcagccaccccgacgttgccaaggaggagccttggtatgggattgagcaagaatacactttgatgcaaaaggatgtgaactggccaattggttggcctgttggtggctaccctggccctcagggaccttactactgtggtgtgggagctgacaaagccattggtcgtgacattgtggatgctcactacaaggcctgtctttacgccggtattggtatttctggtatcaatggagaagtcatgccaggccagtgggagttccaagtcggccctgttgagggtattagttctggtgatcaagtctgggttgctcgataccttctcgagaggatcactgagatctctggtgtaattgtcagcttcgacccgaaaccagtcccgggtgactggaatggagctggagctcactgcaactacagcactaagacaatgagaaacgatggaggattagaagtgatcaagaaagcgatagggaagcttcagctgaaacacaaagaacacattgctgcttacggtgaaggaaacgagcgtcgtctcactggaaagcacgaaaccgcagacatcaacacattctcttggggagtcgcgaaccgtggagcgtcagtgagagtgggacgtgacacagagaaggaaggtaaagggtacttcgaagacagaaggccagcttctaacatggatccttacgttgtcacctccatgatcgctgagacgaccatactcggttga

SEQ ID NO: 301 - DNA, 242 bp, Zea_mays
  misc_feature (7)..(8): n is a, c, g, or t
  misc_feature (11)..(11): n is a, c, g, or t
  misc_feature (38)..(38): n is a, c, g, or t
  misc_feature (58)..(59): n is a, c, g, or t
  misc_feature (70)..(70): n is a, c, g, or t
  misc_feature (74)..(74): n is a, c, g, or t
  misc_feature (91)..(91): n is a, c, g, or t
  misc_feature (121)..(121): n is a, c, g, or t
  misc_feature (124)..(124): n is a, c, g, or t
  misc_feature (158)..(158): n is a, c, g, or t
  misc_feature (165)..(165): n is a, c, g, or t
  misc_feature (191)..(191): n is a, c, g, or t
  misc_feature (201)..(201): n is a, c, g, or t
  misc_feature (208)..(208): n is a, c, g, or t
  misc_feature (219)..(219): n is a, c, g, or t
  misc_feature (229)..(229): n is a, c, g, or t
mactdvnnsdntkaywggsgmdrskartsgvtdskkwnydgsstgagdsvyakdrrgnnvmcdcytagtnkrynaakssvaawygytkdtnwgwggggyycggaksgrdvdahykacyagnsgngvmgwvgsvgssgdvwvaryrtagvvvtdkgdwngagahtnystsmrkggyvkaakkrhrhaayggnrrtgrhtadntswgvanrgasvrvgrtngkgydrrasnmdyvvtsmattwk

SEQ ID NO: 302 - DNA, 1071 bp, Zea_mays
atggcctgcctcaccgacctcgtcaacctcaacctctcggacaacaccgagaagatcatcgcggaatacatatggatcggtggatctggcatggatctcaggagcaaagcaaggaccctctccggcccggtgaccgatcccagcaagctgcccaagtggaactacgacggctccagcacgggccaggcccccggcgaggacagcgaggtcatcctgtacccgcaggccatcttcaaggacccattcaggaggggcaacaacatccttgtgatgtgcgattgctacaccccagccggcgagccaatccccaccaacaagaggtacaacgccgccaagatcttcagcagccctgaggtcgccgccgaggagccgtggtatggtattgagcaggagtacaccctcctccagaaggacaccaactggccccttgggtggcccatcggtggcttccccggccctcagggtccttactactgtggaatcggcgccgaaaagtcgttcggccgcgacatcgtggacgcccactacaaggcctgcttgtatgcgggcatcaacatcagtggcatcaacggggaggtgatgccagggcagtgggagttccaagtcgggccttccgtgggtatatcttcaggcgaccaggtctgggtcgctcgctacattcttgagaggatcacggagatcgccggtgtggtggtgacgttcgacccgaagccgatcccgggcgactggaacggcgccggcgcgcacaccaactacagcacggagtcgatgaggaaggagggcgggtacgaggtgatcaaggcggccatcgagaagctgaagctgcggcacagggagcacatcgcggcatacggcgagggcaacgagcgccggctcaccggcaggcacgagaccgccgacatcaacacgttcagctggggcgtggccaaccgcggcgcgtcggtgcgcgtgggccgggagacggagcagaacggcaagggctacttcgaggaccgccgcccggcgtccaacatggacccctacgtggtcacctccatgatcgccgagaccaccatcatctggaagccctga

SEQ ID NO: 303 - DNA, 1045 bp, Arabidopsis thaliana
aaggtaaagaaaggatacttgtaccgttgtacgtagttaatatcagacaaaaacttgacaaatcatacaattttttcgagttcaaacattgattctttaaacggtaaataattcaaaataattacttcgcctcttttttggtaatgcaagttcaactatggaaacaaatctctatttttattttaagaattggttgtttcaatacgttttttagttgggtgacaaagaagcgtatattttaaattcaatcttagataaaaggaatcaagaacacttaaaaagtcattgtacctaaagacaggcacgattaacaaaaaggaaaacattatatatgtcaacggacatgttacatacttacatgtcagtgtgatataagctgggaagaagacaacaaaagttttagcaacatattatcttgaatttgtgaagatagtgtctattccataattccaacagagtggtatgtctttgcgacatacacacatagacgagctcatgagaatcaagaatcaatatatattatctatatctaacatattccacgcatttcgagtaaccaagatagatgttttagtagttattgccaaactatgtgtgtgcataaagtattaacaagtaggtactgacctagtaaaaaaatgaaaggtataacttataagtttcttacgagtacttagatcactcatgacatcattgtccaagtggaaaccattaatagcaaataaacaaaaatcattgacttattgaagtacgaaattattgactttctcccatttcatcatcaataatggtaacaatttctaatttgtgtggatagtatcttatacgtcatgacaactcttgggaatggtaatttaaccatagaagagattcaatttctttttctaagtttattagattcctttgtttgctaaatcaagattctttcaagttgaagattctttctaatagtatatacaagagggaagaatctttcaactatcactccctacaaattccatgagaaaattcacttttccaatcaaaacgtaaagaagaagaggaa

SEQ ID NO: 304 - DNA, 1332 bp, Caulimovirus sp.
tcctctccaaatgaaatgaacttccttatatagaggaagggtcttgcgaaggatagtgggattgtgcgtcatcccttacgtcagtggagatgtcacatcaatccacttgctttgaagacgtggttggaacgtcttctttttccacgatgctcctcgtgggtgggggtccatctttgggaccactgtcggcagaggcatcttgaatgatagcctttcctttatcgcaatgatggcatttgtaggagccaccttccttttctactgtcctttcgatgaagtgacagatagctgggcaatggaatccgaggaggtttcccgaaattatcctttgttgaaaagtctcaatagccctttggtcttctgagactgtatctttgacatttttggagtagaccagagtgtcgtgctccaccatgttgacgaagattttcttcttgtcattgagtcgtaaaagactctgtatgaactgttcgccagtcttcacggcgagttctgttagatcctcgatttgaatcttagactccatgcatggccttagattcagtaggaactacctttttagagactccaatctctattacttgccttggtttatgaagcaagccttgaatcgtccatactggaatagtacttctgatcttgagaaatatgtctttctctgtgttcttgatgcaattagtcctgaatcttttgactgcatctttaaccttcttgggaaggtatttgatctcctggagattgttactcgggtagatcgtcttgatgagacctgctgcgtaggcctctctaaccatctgtgggtcagcattctttctgaaattgaagaggctaaccttctcattatcagtggtgaacatagtgtcgtcaccttcaccttcgaacttccttcctagatcgtaaagatagaggaaatcgtccattgtaatctccggggcaaaggagatctcttttggggctggatcactgctgggccttttggttcctagcgtgagccagtgggctttttgctttggtgggcttgttagggccttagcaaagctcttgggcttgagttgagcttctcctttggggatgaagttcaacctgtctgtttgctgacttgttgtgtacgcgtcagctgctgctcttgcctctgtaatagtggcaaatttcttgtgtgcaactccgggaacgccgtttgttgccgcctttgtacaaccccagtcatcgtatataccggcatgtggaccgttatacacaacgtagtagttgatatgagggtgttgaatacccgattctgctctgagaggagcaactgtgctgttaagctcagatttttgtgggattggaatt

SEQ ID NO: 305 - DNA, 2164 bp, Zea mays
ttcgttaccaactgggttgcataggatttcatgattaagagtgtgtttggtttagctgtgagttttctcctatgaaaaaactgttgtgagaaaaaatagttggaagtcgtttagttcaaactgttgtgagttatccactgtaaacaaattgtatattgtttatatacactctgtttaaatatatctcttaatcagtatatataattaaaaaactaatttcacatttgtgttcctaatattttttacaaataaatcattgtttaattccatttgtaataagtttttattaaaattgcttttatttcatttattataaacatttaattgttttaatcctattttagttttaatttattgtatctatttattaatataacgaacttcgataagaaacaaaagcaaggtcaaggtgttttttcaaagtagttgtggaaaagctgaaccccttttattcaacttttagaagcaggaaaacagaaccaaacagaccctaaaaatgtgtgaatttttagcaggttaattattcgcatctctttggtcatgtttaagaggctggaatagatcaactgcaagaacacatagcagagtggatagggggggggggggggagggtcgtcgtctccctatctgacctctcttctgcattggattgcctttttcggtactctatttaaaacttaaaagtacaaatgaggtgccggattgatggagtgatatataagtttgatgtgtttttcacataagtgacaagtattattgaaagagaacatttgcattgctactgtttgcatatgggaaaattgagaattgtatcatgccatggccgatcagttctttacttagctcgatgtaatgcacaatgttgatagtatgtcgaggatctagcgatgtaatggtgttaggacacgtggttagctactaatataaatgtaaggtcattcgatggtttttctattttcaattacctagcattatctcatttctaattgtgataacaaatgcattagaccataattctgtaaatatgtacatttaagcacacagtctatattttaaaattcttctttttgtgtggatatcccaacccaaatccacctctctcttcaatccgtgcatgttcaccgctgccaagtgccaacaacacatcgcatcgtgcatatctttgttggcttgtgcacggtcggcgccaatggaggagacacctgtacggtgcccttggtagaacaacatccttatccctatatgtatggtgcccttcgtagaatgacaccccttatccctacaatagccatgtatgcataccaagaattaaatatactttttcttgaaccacaataatttattatagcggcacttcttgttcaggttgaacacttatttggaacaataaaatgccgagttcctaaccacaggttcacttttttttttccttatcctcctaggaaactaaattttaaaatcataaatttaatttaaatgttaatggaaacaaaaaattatctacaaagacgactcttagccacagccgcctcactgcaccctcaaccacatcctgcaaacagacaccctcgccacatccctccagattcttcactccgatgcagcctacttgctaacagacgccctctccacatcctgcaaagcattcctccaaattcttgcgatcccccgaatccagcattaactgctaagggacgccctctccacatcctgctacccaattagccaacggaataacacaagaaggcaggtgagcagtgacaaagcacgtcaacagcaccgagccaagccaaaaaggagcaaggaggagcaagcccaagccgcagccgcagctctccaggtccccttgcgattgccgccagcagtagcagacacccctctccacatcccctccggccgctaacagcagcaagccaagccaaaaaggagcctcagccgcagccggttccgttgcggttaccgccgatcacatgcccaaggccgcgcctttccgaacgccgagggccgcccgttcccgtgcacagccacacacacacccgcccgccaacgactccccatccctatttgaacccacccgcgcactgcattgatcaccaatcgcatcgcagcagcacgagcagcacgccgtgccgctccaaccatctcgcttccgtgcttagcttcc

SEQ ID NO: 306 - DNA, 1377 bp, Zea mays
aattcgcccttgtttaaacttaatatttgtttaaactttttactaaattcatgtaataattaatgtatgcgttatatatatatgtctaggtttataattattcatatgaatatgaacataaaaatctagggctaaaacgactactattttgaaaacggaaggagtagtaagttatttaagcggaggggaaccatgatgggctagtgatttaatttacatatatatattggtgttctgggctcttacatgagaagatctagttaactgttgttactgaacagcgaagacaaatatataatttaagctccccaactgctagtgattctgttaagaggtaatgtttaaagtaaatttacaagagcccgtctagctcagtcggtagagcgcaaggctcttaaccttgtggtcgtgggttcgagccccacggtgggcgcacaattttttgttttttgacattttttgtttgcttagttgcagacggtttttcccctgctaggagatttccgagagaaaaaaaaggcactacaggttaaccaaaaccaccaacctttggagcgtcgaggcgacggggcatttgcgtagttgaagcttacaaagttgcatatgagatgagtgccggacatgaagcggataacgttttaaactggcaacaatatctagctgtttcaaattcaggcgtgggaagctacgcctacgcgccctggacggcgtgtaaagagccagcatcggcatcattgtcaaacgatcgacaaggccaagaaattccaaatatattattaataaaaaagaaggcaccaaattagtttttgttttttagtatgtgtggcggaggaaattttgagaacgaacgtatccaaagaaggcacaagacgatatagattgacgcggctagaaagttgcagcaagacagtgggtacggtcttatatatcctaataaataaaaaataaaactatagtgtgtcaaatgtcaacaagaggaggaggcagccaaattagcagagggagacaagtagagcacgccttattagcttgcttatttatcgtggtggtgtacttgttaattactggcacgcattatcaacaacgcagttctggatgtgaatctagacaaacatttgtctaggttccgcacgtatagttttttttctttttttttgggggggggggggaacggaagctgtaataaacggtactaggaacgaaagcaaccgccgcgcgcatgtttttgcaatagattacggtgaccttgatgcaccaccgcgtgctataaaaaccagtgtccccgagtctactcatcaaccaatccataactcgaaaccttttcttgtgctctgttctgtctgtgtgtttccaaagcaagcgaaagaggtcgagggg

SEQ ID NO: 307 - DNA, 1409 bp, Arabidopsis thaliana
ggaaatgtcatccgttgtggcaaagttcgataataattaattgtctgaaataataaaacctagaaaagtctattttaattagcaaaactaaagaacggtttaaaggaatgatcagagagtattaggatctgtgttgatcttagggtttgtggtttgattgcgattcgaatcacttgtgtaattgcagaagacggatggtaatttaaagagatgatcttagggtttgtggtttgattgcgactaaagactactagacgatgccgttttagattttaatgggctcacacagttgttatctgcaaaccggcccaggtctgttttgacttggtgagtgctaacgtgctctataagaagatattgtagccacatacgaacagctaacgtgctcccatttcctctatgttcccttgagtgacatacgttttcacaataagttgggagcaagtaatttaccaagaacaaatatatattttaaaaaatataggatccttttacaagttcaattattgattttgacgttacgtataaacagtagatcgaccatgacataaataaaaatgaaaaaataattggatcaaatctcagatcttactacagtctacatctacctagctacatgtgctatggcattatttgtttttcatgttatcatcaatattgtataaaagatccaaacacaatcagtgtgatgatatttttctatacttttgatcattcaaccgatttcaattattgtgtttgatcgtttacatagaaataggtacatatgcattcaagatctccagatcgtttattacgtcttgctacatgtgctatgtcactaaaacaactaagatactacatgcaaagttactgtattcattacgcattgatcgtcttcttctacgcactattattgaatttttgtttctcgatgttttcagaagtcataacatataatcaagggtggttgtagctagtcgtgatgaaattcgaatagtaaaagattcatcaaatggatcaagatttgaaactagaatgaatgatcgatacttgaaagctatcacacttaaatagttaaatggacgatataattcaacaatatcttaaataacattaatcattcactttgtagaaatttcaatttgacggtgctaacaacaatatgtgacatttttgtttgcagcaaaaaagtcaaatggtaaaaaaaaacatttttttaaaaagagagtatagtaaaaaaaacagaggataaaaaacgaacaaacggttaaagctggcaaagatcccatcttccccacgctgtcaaattttgtcactacttcccaaaaaaaactctcccgcctctctctctccctctcccttcttattctcctccttcttctccttcaccatctccagatcccaaaatcttcatcgatcatcatcac

SEQ ID NO: 308 - DNA, 896 bp, Zea mays
gtgcagcgtgacccggtcgtgcccctctctagagataatgagcattgcatgtctaagttataaaaaattaccacatattttttttgtcacacttgtttgaagtgcagtttatctatctttatacatatatttaaactttactctacgaataatataatctatagtactacaataatatcagtgttttagagaatcatataaatgaacagttagacatggtctaaaggacaattgagtattttgacaacaggactctacagttttatctttttagtgtgcatgtgttctcctttttttttgcaaatagcttcacctatataatacttcatccattttattagtacatccatttagggtttagggttaatggtttttatagactaatttttttagtacatctattttattctattttagcctctaaattaagaaaactaaaactctattttagtttttttatttaataatttagatataaaatagaataaaataaagtgactaaaaattaaacaaataccctttaagaaattaaaaaaactaaggaaacatttttcttgtttcgagtagataatgccagcctgttaaacgccgtcgacgagtctaacggacaccaaccagcgaaccagcagcgtcgcgtcgggccaagcgaagcagacggcacggcatctctgtcgctgcctctggacccctctcgagagttccgctccaccgttggacttgctccgctgtcggcatccagaaattgcgtggcggagcggcagacgtgagccggcacggcaggcggcctcctcctcctctcacggcaccggcagctacgggggattcctttcccaccgctccttcgctttcccttcctcgcccgccgtaataaatagacaccccctccacaccctctt

SEQ ID NO: 309 - DNA, 1710 bp, Zea mays
ttttaagtatgaccaatttttaagtataaacccctcacgattggttatttttttaagtataaccaatttttaagtataaacccctcaccaatttttaagtataaacctagcgactaataaacacaacttcttgccaaagtgtgagcatcaccattggatctgcgcccctcacgaacagtcttcgccggggtaaaattctccaaattaaagtcatcttgatgtccttgatcacctgtccataaggcccaatcccagctccacgtatacttctgataagattgacatagtcacttgcatgccagtgtggaactctggatgcctaggtcagaggctagtgactggccttcccggcatgctagcatgtagcatgccaaggatctggctgctccaggtttgttatgcctgacatcaccatagggatgagagcaagtataataataggctgtaagctttaaatgctcaggtggagaaaaaaaggagaggagaggagagagaaaagtgggctataagcttatagctgtgttagacataagaatcagaaacttcgtatgagagacaggtgagctatatattaataacaaagagctaactattatatgagtgaaccgagagaaggctgtaaaaaaacttacacaatcaacgatcgacattattattaaccttgctctgtcttgcgagacctctttgacaaagctacatcaatgccggccaagtgccttgggatttgggaatggcttctttcctcccttcctcggttgtcccccaaggcctaggcttgccacgctgtattcagtcgcagccgcctttacttttgccctttgtggaagttttgtaataaatggtctgattctatcttcggatagatgaagccggatgtttcatccattatctaaaaaaaagttggttgctttgctgagctaagaaagtgtaatccagagtgctcgtaacgtattcatgtacataactattatctaatataaatcttcttttgtcgcaaaaaaaggtcggcccatcagaacaaatgatcaatgtaaggcccaaaatttgtgtctcaaatgtcatttacgtttccaagctaaacaaaaacacaggattcatataattttgctggtggcttaggcttcgtccaatagtgcttagtttaatttgtatatacctgcaccatggtattcgtctggccttggatcttgcgcatcaattgcctatggacgatgatcgcagccacgccacattcatttttaatcgccatttgcttgacacccaatgcctctgcaccacttgcgcacgctacgcaccgtctgatacgccaagatcccgagctaaaataacacccaatcatcagatgaaaacaagcgcgagtgcgagccagcccatggcagcgatcttggccatttgcggagccaactgaaagccgtgcacaaaatattcgacaccgtataagggaaaacactagttatacgaggtgggcaataatccagatctcggactcttcctaacccggttcacatgcatagcatatatgatggccggccggggttcacatgaacgccatcccgtgccctagtgcactgatttcttaatcccgggtctcaactataaatacccccttggtgacaccgcgatcaaagcatcgcaaacaagcctagctaagagctctctaactacattagatagagtgatctcgagaggtaactggcttgtgatcgagca

SEQ ID NO: 310 - protein, 52 aa, artificial sequence
  conserved region
PFWYASGATIQVLLFGIIAIEIKRKAPSAHTVCEIVRARWGFEAHMVFLSFC

SEQ ID NO: 311 - protein, 52 aa, artificial sequence
  conserved region
LTGVDIYAASFLIPLGVIVYTLAGGLKATFLASYIHSVIVHVVLVIFVYLVY

SEQ ID NO: 312 - protein, 40 aa, artificial sequence
  conserved region
PVSGNYGGSYVTMLSSGGLVFGIINIVGNFGTVFVDNGYW

SEQ ID NO: 313 - protein, 54 aa, artificial sequence
  conserved region
PATATALMGNSGAILLLTMLFMAVTSAGSSELVAVSSLCTYDIYRTYINPKATG

SEQ ID NO: 314 - protein, 43 aa, artificial sequence
  conserved region
RVSLGWMYLAMGVMVGSAVMPIAFLLLWSKANAKGAIAGTIVG

SEQ ID NO: 315 - protein, 17 aa, artificial sequence
  conserved region
  misc_feature (7)..(7): Xaa can be any naturally occurring amino acid
  misc_feature (12)..(12): Xaa can be any naturally occurring amino acid
  misc_feature (14)..(14): Xaa can be any naturally occurring amino acid
YASASLXKQRKXPXHRT

SEQ ID NO: 316 - protein, 9 aa, artificial sequqnce
  conserved region
  misc_feature (2)..(2): Xaa can be any naturally occurring amino acid
  misc_feature (5)..(5): Xaa can be any naturally occurring amino acid
  misc_feature (8)..(8): Xaa can be any naturally occurring amino acid
GXYTXGGXA

SEQ ID NO: 317 - protein, 4 aa, artificial sequence
  conserved region
  misc_feature (2)..(2): Xaa can be any naturally occurring amino acid
GXGL

SEQ ID NO: 318 - protein, 12 aa, artificial sequence
  conserved region
  misc_feature (2)..(2): Xaa can be any naturally occurring amino acid
  misc_feature (4)..(4): Xaa can be any naturally occurring amino acid
  misc_feature (11)..(11): Xaa can be any naturally occurring amino acid
VXPXIMLMLGXG

SEQ ID NO: 319 - protein, 7 aa, artificial sequence
  conserved region
  misc_feature (2)..(2): Xaa can be any naturally occurring amino acid
  misc_feature (4)..(4): Xaa can be any naturally occurring amino acid
  misc_feature (6)..(6): Xaa can be any naturally occurring amino acid
SXYXPXA

SEQ ID NO: 320 - protein, 3 aa, artificial sequence
  conserved region
  misc_feature (2)..(2): Xaa can be any naturally occurring amino acid
VXP

SEQ ID NO: 321 - DNA, 2526 bp, Zea mays
atgaggctgctgccgagggaggcggacaaattggcgctgcacaatgccggcttcctcgcgcagaagcgccttgcccggggcctccgcctcaactacaccgaggccgtcgcgctcatcgccgcgcagattcttgagcttattcgcgatggagacaaaaccgtgacagacctcatggacctggggaaacaactattgggcaggagacaagttcttccagctgttccataccttttacatactgtgcaggttgaaggaacatttgtggatggaacaaaactagttactgtacacgaccctatctccttggatgacggaaatttggagctagcattgcatggttcttttctcccagtgccttcacctgaaaagttttccagcgatgacgttgaagaatatcctggtgaaatacattacagttctagtcgcatagtcctaaaccttcatcgcagggctttatctctgaaggttgttaacaaggcagacagacccattcagattggaagccattaccattttatagagaccaatccttatctggtttttgataggaaaagggcctatggcatgaggttgaacatacttgctggaacagctgttcggtttgagccaggggatgcaaaaagtgttatacttgtaagcatcggaggtcataaggtaatcaaaggtggaaatggcattgctgatggtcctattgacagttcaagtcttaatgtggtgatgcagaaggttaatgcaaatagttttggacatgaagattatccagatgcaagggaaggtattattggtgatggttcatttgactgtactgttgatcatgagaagtatgcgagcatttatggacctaccaccggtgataagattaggcttggtgataccaatctttatgctgagattgaaaaggacttcgccttttatggtgatgagtgcatatttggcggtggaaaagttctgcgtgatggcatgggacaagcttcagggtacccagaatctttctgcctagatacagttataacaaatgctgttgtgattgattataccggaatatacaaggctgatatcggtataaaaggtggacttatagttgctattggaaaggctggaaaccctgatgtcatggatggtgtccataacaacatgattgttggggtcaatactgaagttattgcatctgaaggcatgattgtcactgctggtggcatagattgccatgtccactttatatgtcctcagttggcagaagaggcaattgcaagcggcatcacgacattggtgggtggtggaaccggaccagcacatggaacttgtgccacaacttgcactccagcaccatctcaattgaaattaatgttgcagtccactgatcaattgccaattaacatgggattcacaggcaagggaaatacttcaaaacctgaaggattggctgaaatcattaaagctggagcaatgggtttgaagctgcatgaagattggggaactaccccatccgcgatagataattgtttatctgttgcagaagattttgatattcaggtcaatatacacacagataccttaaatgaatcaggctgcgtggagcatacaatcgcagcttttaaaggtagagccatacatacatatcacagtgaaggtgctggtggcggtcatgctccagacatcatcaaagtttgtggggtaaaaaatgtgttgccctcttcaacaaatcctacccggccatttacttcgaacactgtagacgagcaccttgatatgctgatggtttgtcaccaccttgataaaaacattccagaagatgtagcatttgccgagtctagaattcgagctgaaacaattgctgctgaggacatattgcatgacatgggagccataagtattatatcatctgattcacaggccatggggcgcgttggagaggtgataacacgaacatggcaaactgcaaacaagatgaaggtacaaagaggtagtttacctggatctggtgacgctaatgccgccccggacagtgacaacctccgtataagaagatacatagcaaaatacacaataaatccagcaatagtgaatgggttttcagactttgttggttctgttgaggtgggaaaattagctgaccttgttctttggaaaccatctttcttcggcgctaaaccagaactggttgtaaagggaggtgcaattgcatgggctaacatgggtgatcccaatgctagcattccaacacctgaacctgttgtgatgcgacctatgtttggtgcatttggaaaggctggaagttccaattcaattgcatttgtgagcaaggctgctaaagaagctggtgtcgcaacggagtacagactagaaaagagggtggaagctgtaggccgtgttcgaggcctgacaaagcttgacatgaagctcaacgacgccctcccgaaaatagaggtcgacccggagacctacacagtgaccgctgatggagaggttttgacatgccaaccagcacccacactgccactgtctcggaattacttcctgttctag

SEQ ID NO: 322 - protein, 841 aa, Zea mays
MRLLPREADKLALHNAGFLAQKRLARGLRLNYTEAVALIAAQILELIRDGDKTVTDLMDLGKQLLGRRQVLPAVPYLLHTVQVEGTFVDGTKLVTVHDPISLDDGNLELALHGSFLPVPSPEKFSSDDVEEYPGEIHYSSSRIVLNLHRRALSLKVVNKADRPIQIGSHYHFIETNPYLVFDRKRAYGMRLNILAGTAVRFEPGDAKSVILVSIGGHKVIKGGNGIADGPIDSSSLNVVMQKVNANSFGHEDYPDAREGIIGDGSFDCTVDHEKYASIYGPTTGDKIRLGDTNLYAEIEKDFAFYGDECIFGGGKVLRDGMGQASGYPESFCLDTVITNAVVIDYTGIYKADIGIKGGLIVAIGKAGNPDVMDGVHNNMIVGVNTEVIASEGMIVTAGGIDCHVHFICPQLAEEAIASGITTLVGGGTGPAHGTCATTCTPAPSQLKLMLQSTDQLPINMGFTGKGNTSKPEGLAEIIKAGAMGLKLHEDWGTTPSAIDNCLSVAEDFDIQVNIHTDTLNESGCVEHTIAAFKGRAIHTYHSEGAGGGHAPDIIKVCGVKNVLPSSTNPTRPFTSNTVDEHLDMLMVCHHLDKNIPEDVAFAESRIRAETIAAEDILHDMGAISIISSDSQAMGRVGEVITRTWQTANKMKVQRGSLPGSGDANAAPDSDNLRIRRYIAKYTINPAIVNGFSDFVGSVEVGKLADLVLWKPSFFGAKPELVVKGGAIAWANMGDPNASIPTPEPVVMRPMFGAFGKAGSSNSIAFVSKAAKEAGVATEYRLEKRVEAVGRVRGLTKLDMKLNDALPKIEVDPETYTVTADGEVLTCQPAPTLPLSRNYFLF
